(19) United States
(12) Patent Application Publication
(10) Pub. No.: US 2025/0341513 A1
(43) Pub. Date: Nov. 6, 2025

(54) Bordetella T Cells Epitopes, Megapools and Uses Thereof

(71) Applicant: LA JOLLA INSTITUTE FOR IMMUNOLOGY, La Jolla, CA (US)

(72) Inventors: Alessandro Sette, La Jolla, CA (US); Ricardo Da Silva Antunes, La Jolla, CA (US)

(21) Appl. No.: 18/873,483

(22) PCT Filed: Jun. 28, 2023
(86) PCT No.: PCT/US2023/069274

§ 371 Date: Dec. 10, 2024

Related U.S. Application Data
(60) Provisional application No. 63/356,446, filed on Jun. 28, 2022.
(60) Provisional application No. 63/451,520, filed on Mar. 10, 2023.

(51) Int. Cl. G01N 33/50; C07K 14/235; G01N 33/569

(52) U.S. Cl. CPC G01N 33/5091; C07K 14/235; G01N 33/56911; G01N 2333/235; G01N 2469/20

(57) ABSTRACT

The present invention includes compositions, including epitope megapools, and methods for detecting the presence of: a Bordetella or an immune response relevant to a Bordetella infection including T cells responsive to one or more Bordetella peptides or proteins comprising, consisting of, or consisting essentially of: one or more amino acid sequences, fusion proteins, a pool of 2 or more peptides, or polynucleotides that expression the amino acid sequences selected from those set forth in any one of Tables 1-20 (SEQ ID NOS: 1 to 2598). The invention further provides vaccines, diagnostics, therapies, and kits, comprising such proteins or peptides.

### CROSS-REFERENCE TO RELATED APPLICATIONS

[0001] This application claims priority to U.S. Provisional Application Ser. No. 63/356,446, filed Jun. 28, 2022, and U.S. Provisional Application Ser. No. 63/451,520, filed Mar. 10, 2023 the entire contents of which are incorporated herein by reference.

### STATEMENT OF GOVERNMENT SUPPORT

[0002] The inventions described in the present disclosure were made with government support under Contract No. 75N93019C00066, awarded by the National Institutes of Health. The government has certain rights in the invention.

### TECHNICAL FIELD OF THE INVENTION

[0003] The present invention relates in general to the field of proteins and peptides that are T cell epitopes and/or antigens for Bordetella, including epitopes and antigens from B. pertussis, and more particularly, to compositions and methods for the prevention, treatment, diagnosis, kits, and uses of such T cell epitopes and antigens, including megapools, for use in detecting and characterizing B. pertussis specific responses in infection and following vaccination.

### INCORPORATION-BY-REFERENCE OF MATERIALS FILED ON COMPACT DISC

[0004] The present application includes a Sequence Listing which has been submitted in ASCII format via EFS-Web and is hereby incorporated by reference in its entirety. Said ASCII copy, created on July ______, 2023, is named LJII2021.xml and is ______ bytes in size.

### BACKGROUND OF THE INVENTION

[0005] Without limiting the scope of the invention, its background is described in connection with the Gram-negative, aerobic, pathogenic, encapsulated coccobacillus of the genus Bordetella.

[0006] A need remains for identifying antigens and T cell epitopes for use in diagnostics, treatments, vaccines, kits, etc., for Bordetella related diseases and conditions, including whooping cough. There is additionally a specific need in the art for optimized megapools for use in detecting and characterizing B. pertussis specific responses in infection and following vaccination.

### SUMMARY OF THE INVENTION

[0007] In one embodiment, the present invention includes a composition comprising: one or more peptides or proteins, comprising, consisting of, or consisting essentially of an amino acid sequence selected from the sequences set forth in any one of Tables 1-20 (SEQ ID NOS: 1 to 2598), or a subsequence, portion, homologue, variant or derivative thereof, a fusion protein comprising one or more amino acid sequences selected from any one of those sequences set forth in Tables 1-20; a pool of 2 or more or more peptides comprising, consisting of, or consisting essentially of amino acid sequences selected from any one of those sequences set forth in Tables 1-20; or a polynucleotide that encodes one or more peptides or proteins, comprising, consisting of, or consisting essentially of an amino acid sequence selected from any one of those sequences set forth in Tables 1-20, or a subsequence, portion, homologue, variant or derivative thereof. In one aspect, the one or more peptides or proteins comprises, or wherein the fusion protein comprises 2 or more or more amino acid sequences selected from any one of those sequences set forth in Tables 1-20, or a subsequence, portion, homologue, variant or derivative thereof. In another aspect, the amino acid sequence is selected from a Bordetella T cell epitope selected from any one of those sequences set forth in Tables 1-20. In another aspect, the composition comprises one or more B. pertussis peptides amino acid sequences selected from any one of those sequences set forth in Tables 1-20, or a subsequence, portion, homologue, variant or derivative thereof; a fusion protein comprising one or more amino acid sequences selected from any one of those sequences set forth in Tables 1-20; or a pool of 2 or more peptides selected from any one of those sequences set forth in Tables 1-20. In another aspect, the peptide or protein comprises a Bordetella T cell epitope. In another aspect, the one or more peptides or proteins comprises a Bordetella CD8+ or CD4+ T cell epitope. In another aspect, the Bordetella is B. pertussis and the B. pertussis T cell epitope is not conserved in another Bordetella. In another aspect, the Bordetella is B. pertussis and the B. pertussis T cell epitope is conserved in another Bordetella. In another aspect, the one or more peptides or proteins has a length from about 9-15, 15-20, 20-25, 25-30, 30-40, 40-50, 50-75 or 75-100 amino acids. In another aspect, the one or more peptides or proteins elicits, stimulates, induces, promotes, increases or enhances a T cell response to a Bordetella. In another aspect, the one or more peptides or proteins that elicits, stimulates, induces, promotes, increases or enhances the T cell response to the Bordetella is a Bordetella protein or peptide, or a variant, homologue, derivative or subsequence thereof. In another aspect, the composition further comprises formulating the one or more peptides or proteins into an immunogenic formulation with an adjuvant. In another aspect, the adjuvant is selected from the group consisting of adjuvant is selected from the group consisting of alum, aluminum hydroxide, aluminum phosphate, calcium phosphate hydroxide, cytosine-guanosine oligonucleotide (CpG-ODN) sequence, granulocyte macrophage colony stimulating factor (GM-CSF), monophosphoryl lipid A (MPL), poly(I:C), MF59, Quil A, N-acetyl muramyl-L-alanyl-D-isoglutamine (MDP), FIA, montanide, poly (DL-lactide-coglycolide), squalene, virosome, AS03, ASO4, IL-1, IL-2, IL-3, IL-4, IL-5, IL-6, IL-7, IL-8, IL-10, IL-12, IL-15, IL-17, IL-18, STING, CD40L, pathogen-associated molecular patterns (PAMPs), damage-associated molecular pattern molecules (DAMPs), Freund's complete adjuvant, Freund's incomplete adjuvant, transforming growth factor (TGF)-beta antibody or antagonists, A2aR antagonists, lipopolysaccharides (LPS), Fas ligand, Trail, lymphotactin, Mannan (M-FP), APG-2, Hsp70 and Hsp90, pattern recognition receptor ligands, TLR3 ligands, TLR4 ligands, TLR5 ligands, TLR7/8 ligands, and TLR9 ligands. In another aspect, the composition further comprises a modulator of immune response. In another aspect, the modulator of immune response is a modulator of the innate immune response. In another aspect, the modulator is Interleukin-6 (IL-6), Interferon-gamma (IFN-γ), Transforming growth factor beta (TGF-β), or Interleukin-10 (IL-10), or an agonist or antagonist thereof.

[0008] In another embodiment, the present invention includes a composition comprising monomers or multimers of: peptides or proteins comprising, consisting of, or consisting essentially of: one or more amino acid sequences selected from any one of those sequences set forth in Tables 1-20, concatemers, subsequences, portions, homologues, variants or derivatives thereof, a fusion protein comprising one or more amino acid sequences selected from any one of those sequences set forth in Tables 1-20; or a polynucleotide that encodes one or more peptides or proteins, comprising, consisting of, or consisting essentially of an amino acid sequence selected from any one of those sequences set forth in Tables 1-20, or a subsequence, portion, homologue, variant or derivative thereof.

[0009] In another embodiment, the present invention includes a composition comprising one or more peptide-major histocompatibility complex (MHC) monomers or multimers, wherein the peptide-MHC monomer or multimer comprises a peptide comprising, consisting of, or consisting essentially of an amino acid sequence selected from any one of those sequences set forth in Tables 1-20, in a groove of the MHC monomer or multimer.

[0010] In another embodiment, the present invention includes a composition comprising: one or more peptides or proteins comprising, consisting of, or consisting essentially of an amino acid sequence selected from any one of those sequences set forth in Tables 1-20, or a subsequence, portion, homologue, variant or derivative thereof, a fusion protein comprising one or more amino acid sequences selected from any one of those sequences set forth in Tables 1-20; a pool of 2 or more peptides selected from any one of those sequences set forth in Tables 1-20; a polynucleotide that encodes one or more peptides or proteins, comprising, consisting of, or consisting essentially of an amino acid sequence selected from any one of those sequences set forth in Tables 1-20, or a subsequence, portion, homologue, variant or derivative thereof. In one aspect, the one or more peptides or proteins comprises, or wherein the fusion protein comprises, 2 or more amino acid sequences selected from any one of those sequences set forth in Tables 1-20, or a subsequence, portion, homologue, variant or derivative thereof. In another aspect, the protein or peptide comprises a B. pertussis T cell epitope. In another aspect, the one or more peptides or proteins comprises a B. pertussis CD8+ or CD4+ T cell epitope. In another aspect, the B. pertussis T cell epitope is not conserved in another Bordetella. In another aspect, the B. pertussis T cell epitope is conserved in another Bordetella. In another aspect, the one or more peptides or proteins has a length from about 9-15, 15-20, 20-25, 25-30, 30-40, 40-50, 50-75 or 75-100 amino acids. In another aspect, the one or more peptides or proteins elicits, stimulates, induces, promotes, increases or enhances a T cell response to B. pertussis. In another aspect, the one or more peptides or proteins that elicits, stimulates, induces, promotes, increases or enhances the T cell response to B. pertussis is a B. pertussis protein or peptide, or a variant, homologue, derivative or subsequence thereof. In another aspect, the composition further comprises formulating the one or more peptides or proteins into an immunogenic formulation with an adjuvant. In another aspect, the adjuvant is selected from the group consisting of adjuvant is selected from the group consisting of alum, aluminum hydroxide, aluminum phosphate, calcium phosphate hydroxide, cytosine-guanosine oligonucleotide (CpG-ODN) sequence, granulocyte macrophage colony stimulating factor (GM-CSF), monophosphoryl lipid A (MPL), poly(I:C), MF59, Quil A, N-acetyl muramyl-L-alanyl-D-isoglutamine (MDP), FIA, montanide, poly (DL-lactide-coglycolide), squalene, virosome, ASO3, ASO4, IL-1, IL-2, IL-3, IL-4, IL-5, IL-6, IL-7, IL-8, IL-10, IL-12, IL-15, IL-17, IL-18, STING, CD40L, pathogen-associated molecular patterns (PAMPs), damage-associated molecular pattern molecules (DAMPs), Freund's complete adjuvant, Freund's incomplete adjuvant, transforming growth factor (TGF)-beta antibody or antagonists, A2aR antagonists, lipopolysaccharides (LPS), Fas ligand, Trail, lymphotactin, Mannan (M-FP), APG-2, Hsp70 and Hsp90, pattern recognition receptor ligands, TLR3 ligands, TLR4 ligands, TLR5 ligands, TLR7/8 ligands, and TLR9 ligands. In another aspect, the composition further comprises a modulator of immune response. In another aspect, the modulator of immune response is a modulator of the innate immune response. In another aspect, the modulator is Interleukin-6 (IL-6), Interferon-gamma (IFN-γ), Transforming growth factor beta (TGF-β), or Interleukin-10 (IL-10), or an agonist or antagonist thereof.

[0011] In another embodiment, the present invention includes a composition comprising monomers or multimers of: one or more peptides or proteins comprising, consisting of, or consisting essentially of: one or more B. pertussis amino acid sequences selected from any one of those sequences set forth in Tables 1-20, concatemers, subsequences, portions, homologues, variants or derivatives thereof, a fusion protein comprising one or more amino acid sequences selected from any one of those sequences set forth in Tables 1-20; or a polynucleotide that encodes one or more peptides or proteins, comprising, consisting of, or consisting essentially of an amino acid sequence selected from any one of those sequences set forth in Tables 1-20, or a subsequence, portion, homologue, variant or derivative thereof.

[0012] In another embodiment, the present invention includes a composition comprising one or more peptide-major histocompatibility complex (MHC) monomers or multimers, wherein the peptide-MHC monomer or multimer comprises a peptide comprising, consisting of, or consisting essentially of an amino acid sequence selected from any one of those sequences set forth in Tables 1-20, in a groove of the (MHC) monomer or multimer.

[0013] In another embodiment, the present invention includes a method for detecting the presence of: (i) a Bordetella or (ii) an immune response relevant to Bordetella infections, vaccines or therapies, including T cells responsive to one or more Bordetella peptides, comprising: providing one or more proteins or peptides for detection of an amount or a relative amount of, and/or the activity of, and/or the state of antigen-specific T-cells; contacting a biological sample suspected of having Bordetella-specific T-cells to one or more proteins or peptides for detection; and detecting an amount or a relative amount of, and/or the activity of, and/or the state of antigen-specific T-cells in the biological sample, wherein the one or more proteins or peptides for detection comprise one or more amino acid sequences set forth in any one of Tables 1-20, or comprise a pool of 2 or more or more amino acid sequences set forth in any one of Tables 1-20. In one aspect, detecting the amount or a relative amount of, and/or activity of antigen-specific T-cells comprises one or more steps of identification or detection of the antigen-specific T-cells and measuring the amount of the antigen-specific T-cells. In another aspect, the one or more peptides or proteins comprises 2 or more amino acid sequences selected from any one of Tables 1-20. In another aspect, the detecting the amount or a relative amount of, and/or activity of antigen-specific T-cells comprises indirect detection and/or direct detection. In another aspect, the method of detecting an immune response relevant to the Bordetella comprises the following steps: providing an MHC monomer or an MHC multimer; contacting a population T-cells to the MHC monomer or MHC multimer; and measuring the number, activity or state of T-cells specific for the MHC monomer or MHC multimer. In one aspect, the MHC monomer or MHC multimer comprises a protein or peptide of the Bordetella. In another aspect, the protein or peptide comprises a CD8+ or CD4+ T cell epitope. In another aspect, the T cell epitope is not conserved in another Bordetella. In another aspect, the T cell epitope is conserved in another Bordetella. In another aspect, the protein or peptide has a length from about 9-15, 15-20, 20-25, 25-30, 30-40, 40-50, 50-75 or 75-100 amino acids. In another aspect, the proteins or peptides comprise 2 or more amino acid sequences selected from any one of those sequences set forth in Tables 1-20, or a subsequence, portion, homologue, variant or derivative thereof. In another aspect, the method further comprises detecting the presence or amount of the one or more peptides in a biological sample, or a response thereto, which is diagnostic of a Bordetella infection. In another aspect, the detecting an amount or a relative amount of, and/or the activity of, and/or the state of antigen-specific T-cells in the biological sample comprises measuring one or more of a cytokine or lymphokine secretion assay, T cell proliferation, immunoprecipitation, immunoassay, ELISA, radioimmunoassay, immunofluorescence assay, Western Blot, FACS analysis, a competitive immunoassay, a noncompetitive immunoassay, a homogeneous immunoassay a heterogeneous immunoassay, a bioassay, a reporter assay, a luciferase assay, a microarray, a surface plasmon resonance detector, a florescence resonance energy transfer, immunocytochemistry, or a cell mediated assay, or a cytokine proliferation assay. In another aspect, the method further comprises administering a treatment comprising the composition of one or more proteins, peptides or multimers to the subject from which the biological sample was drawn that increases the amount or relative amount of, and/or activity of the antigen-specific T-cells.

[0014] In another embodiment, the present invention includes a method for detecting the presence of: (i) B. pertussis or (ii) an immune response relevant to B. pertussis infections, vaccines or therapies, including T cells responsive to one or more B. pertussis peptides, comprising: providing one or more proteins or peptides for detection of an amount or a relative amount of, and/or the activity of, and/or the state of antigen-specific T-cells; contacting a biological sample suspected of having B. pertussis-specific T-cells to one or more proteins or peptides for detection; and detecting an amount or a relative amount of, and/or the activity of, and/or the state of antigen-specific T-cells in the biological sample, wherein the one or more proteins or peptides for detection comprise one or more amino acid sequences set forth in those sequences set forth in any one of Tables 1-20, or comprise a pool of 2 or more amino acid sequences set forth in those sequences set forth in any one of Tables 1-20. In one aspect, detecting the amount or a relative amount of, and/or activity of antigen-specific T-cells comprises one or more steps of identification or detection of the antigen-specific T-cells and measuring the amount of the antigen-specific T-cells. In another aspect, the one or more peptides or proteins comprises 2 or more amino acid sequences selected from any one of those sequences set forth in Tables 1-20. In another aspect, detecting the amount or a relative amount of, and/or activity of antigen-specific T-cells comprises indirect detection and/or direct detection. In another aspect, detecting an immune response relevant to B. pertussis comprises the following steps: providing an MHC monomer or an MHC multimer; contacting a population T-cells to the MHC monomer or MHC multimer; and measuring the number, activity or state of T-cells specific for the MHC monomer or MHC multimer. In another aspect, the MHC monomer or MHC multimer comprises a protein or peptide of B. pertussis. In another aspect, the protein or peptide comprises a B. pertussis CD8+ or CD4+ T cell epitope. In another aspect, the B. pertussis T cell epitope is not conserved in another Bordetella. In another aspect, the B. pertussis T cell epitope is conserved in another Bordetella. In another aspect, the protein or peptide has a length from about 9-15, 15-20, 20-25, 25-30, 30-40, 40-50, 50-75 or 75-100 amino acids. In another aspect, the proteins or peptides comprise 2 or more amino acid sequences selected from any one of those sequences set forth in Tables 1-20, or a subsequence, portion, homologue, variant or derivative thereof. In another aspect, the method further comprises detecting the presence or amount of the one or more peptides in a biological sample, or a response thereto, which is diagnostic of a B. pertussis infection. In another aspect, detecting an amount or a relative amount of, and/or the activity of, and/or the state of antigen-specific T-cells in the biological sample comprises measuring one or more of a cytokine or lymphokine secretion assay, T cell proliferation, immunoprecipitation, immunoassay, ELISA, radioimmunoassay, immunofluorescence assay, Western Blot, FACS analysis, a competitive immunoassay, a noncompetitive immunoassay, a homogeneous immunoassay a heterogeneous immunoassay, a bioassay, a reporter assay, a luciferase assay, a microarray, a surface plasmon resonance detector, a florescence resonance energy transfer, immunocytochemistry, or a cell mediated assay, or a cytokine proliferation assay. In another aspect, the method further comprises administering a treatment comprising the composition of one or more proteins, peptides or multimers to the subject from which the biological sample was drawn that increases the amount or relative amount of, and/or activity of the antigen-specific T-cells.

[0015] In another embodiment, the present invention includes a method detecting a Bordetella infection or exposure in a subject, the method comprising, consisting of, or consisting essentially of: contacting a biological sample from a subject with a composition of composition of one or more proteins, peptides or multimers; and determining if the composition elicits an immune response from the contacted cells, wherein the presence of an immune response indicates that the subject has been exposed to or infected with Bordetella. In one aspect, the sample comprises T cells. In another aspect, the response comprises inducing, increasing, promoting or stimulating anti-Bordetella activity of T cells. In another aspect, the T cells are CD8+ or CD4+ T cells. In another aspect, the method comprises determining whether the subject has been infected by or exposed to the Bordetella more than once by determining if the subject elicits a secondary T cell immune response profile that is different from a primary T cell immune response profile. In another aspect, the method further comprises diagnosing a Bordetella infection or exposure in a subject, the method comprising contacting a biological sample from a subject with a composition of composition of one or more proteins, peptides or multimers, and determining if the composition elicits a T cell immune response, wherein the T cell immune response identifies that the subject has been infected with or exposed to a Bordetella. In another aspect, the method is conducted three or more days following the date of suspected infection by or exposure to a Bordetella.

[0016] In another embodiment, the present invention includes a method detecting B. pertussis infection or exposure in a subject, the method comprising, consisting of, or consisting essentially of: contacting a biological sample from a subject with a composition of composition of one or more proteins, peptides or multimers; and determining if the composition elicits an immune response from the contacted cells, wherein the presence of an immune response indicates that the subject has been exposed to or infected with B. pertussis. In another aspect, the sample comprises T cells. In another aspect, the response comprises inducing, increasing, promoting or stimulating anti-B. pertussis activity of T cells. In another aspect, the T cells are CD8+ or CD4+ T cells. In another aspect, the method comprises determining whether the subject has been infected by or exposed to B. pertussis more than once by determining if the subject elicits a secondary T cell immune response profile that is different from a primary T cell immune response profile. In another aspect, the method further comprises diagnosing a B. pertussis infection or exposure in a subject, the method comprising contacting a biological sample from a subject with a composition of one or more proteins, peptides or multimers; and determining if the composition elicits a T cell immune response, wherein the T cell immune response identifies that the subject has been infected with or exposed to B. pertussis. In another aspect, the method is conducted three or more days following the date of suspected infection by or exposure to a Bordetella.

[0017] In another embodiment, the present invention includes a kit for the detection of Bordetella or an immune response to Bordetella in a subject comprising, consisting of or consisting essentially of: one or more T cells that specifically detect the presence of: one or more amino acid sequences selected from any one of those sequences set forth in Tables 1-20, or a subsequence, portion, homologue, variant or derivative thereof, or a fusion protein comprising one or more amino acid sequences selected from any one of those sequences set forth in Tables 1-20; or a pool of 2 or more or more peptides selected from the amino acid sequences set forth in any one of Tables 1-20. In one aspect, the one or more amino acid sequences are selected from a Bordetella T cell epitope set forth in any one of Tables 1-20. In another aspect, the composition comprises: one or more amino acid sequences selected from any one of those sequences set forth in Tables 1-20, or a subsequence, portion, homologue, variant or derivative thereof, a fusion protein comprising one or more amino acid sequences selected from any one of those sequences set forth in Tables 1-20; or a pool of 2 or more peptides selected from the amino acid sequences set forth in those sequences set forth in any one of Tables 1-20. In another aspect, the amino acid sequence comprises a Bordetella CD8+ or CD4+ T cell epitope. In another aspect, the T cell epitope is not conserved in another Bordetella. In another aspect, the T cell epitope is conserved in another Bordetella. In another aspect, the fusion protein has a length from about 9-15, 15-20, 20-25, 25-30, 30-40, 40-50, 50-75 or 75-100 amino acids. In another aspect, the kit includes instruction for a diagnostic method, a process, a composition, a product, a service or component part thereof for the detection of: (i) Bordetella or (ii) an immune response relevant to Bordetella infections, vaccines or therapies, including T cells responsive to Bordetella. In another aspect, the kit includes reagents for detecting an amount or a relative amount of, and/or the activity of, and/or the state of antigen-specific T-cells in the biological sample comprises measuring one or more of a cytokine or lymphokine secretion assay, T cell proliferation, immunoprecipitation, immunoassay, ELISA, radioimmunoassay, immunofluorescence assay, Western Blot, FACS analysis, a competitive immunoassay, a noncompetitive immunoassay, a homogeneous immunoassay a heterogeneous immunoassay, a bioassay, a reporter assay, a luciferase assay, a microarray, a surface plasmon resonance detector, a florescence resonance energy transfer, immunocytochemistry, or a cell mediated assay, or a cytokine proliferation assay. In another aspect, the kit includes reagents for determining a Human Leukocyte Antigen (HLA) profile of a subject, and selecting peptides that are presented by the HLA profile of the subject for detecting an immune response to Bordetella.

[0018] In another embodiment, the present invention includes a kit for the detection of B. pertussis or an immune response to B. pertussis in a subject comprising, consisting of or consisting essentially of: one or more T cells that specifically detect the presence of: one or more amino acid sequences selected from any one of those sequences set forth in Tables 1-20, or a subsequence, portion, homologue, variant or derivative thereof; a fusion protein comprising one or more amino acid sequences selected from any one of those sequences set forth in Tables 1-20; or a pool of 2 or more peptides selected from the amino acid sequences set forth in those sequences set forth in any one of Tables 1-20. In another aspect, the amino acid sequence comprises a B. pertussis CD8+ or CD4+ T cell epitope. In another aspect, the B. pertussis T cell epitope is not conserved in another Bordetella. In another aspect, the B. pertussis T cell epitope is conserved in another Bordetella. In another aspect, the fusion protein has a length from about 9-15, 15-20, 20-25, 25-30, 30-40, 40-50, 50-75 or 75-100 amino acids. In another aspect, the kit includes instruction for a diagnostic method, a process, a composition, a product, a service or component part thereof for the detection of: (i) B. pertussis or (ii) an immune response relevant to B. pertussis infections, vaccines or therapies, including T cells responsive to B. pertussis. In another aspect, the kit includes reagents for detecting an amount or a relative amount of, and/or the activity of, and/or the state of antigen-specific T-cells in the biological sample comprises measuring one or more of a cytokine or lymphokine secretion assay, T cell proliferation, immunoprecipitation, immunoassay, ELISA, radioimmunoassay, immunofluorescence assay, Western Blot, FACS analysis, a competitive immunoassay, a noncompetitive immunoassay, a homogeneous immunoassay a heterogeneous immunoassay, a bioassay, a reporter assay, a luciferase assay, a microarray, a surface plasmon resonance detector, a florescence resonance energy transfer, immunocytochemistry, or a cell mediated assay, or a cytokine proliferation assay. In another aspect, the kit includes reagents for determining a Human Leukocyte Antigen (HLA) profile of a subject, and selecting peptides that are presented by the HLA profile of the subject for detecting an immune response to B. pertussis.

[0019] In another embodiment, the present invention includes a method of stimulating, inducing, promoting, increasing, or enhancing an immune response against a Bordetella in a subject, comprising: administering a composition of one or more proteins, peptides, multimers or a polynucleotide that expresses the protein, peptide or multimers, in an amount sufficient to stimulate, induce, promote, increase, or enhance an immune response against the Bordetella in the subject. In another aspect, the immune response provides the subject with protection against a Bordetella infection or pathology, or one or more physiological conditions, disorders, illnesses, diseases or symptoms caused by or associated with Bordetella infection or pathology. In another aspect, the immune response is specific to: one or more B. pertussis peptides selected from the amino acid sequences set forth in any one of Tables 1-20, or a subsequence, portion, homologue, variant or derivative thereof.

[0020] In another embodiment, the present invention includes a method of stimulating, inducing, promoting, increasing, or enhancing an immune response against B. pertussis in a subject, comprising: administering a composition of proteins, peptides, multimers or a polynucleotide that expresses the protein, peptide or multimers, in an amount sufficient to stimulate, induce, promote, increase, or enhance an immune response against B. pertussis in the subject. In one aspect, the immune response provides the subject with protection against a B. pertussis infection or pathology, or one or more physiological conditions, disorders, illnesses, diseases or symptoms caused by or associated with B. pertussis infection or pathology. In another aspect, the immune response is specific to: one or more B. pertussis peptides selected from the amino acid sequences set forth in those sequences set forth in any one of Tables 1-20, or a subsequence, portion, homologue, variant or derivative thereof.

[0021] In another embodiment, the present invention includes a method of stimulating, inducing, promoting, increasing, or enhancing an immune response against B. pertussis in a subject, comprising: administering to a subject an amount of a protein or peptide comprising, consisting of or consisting essentially of an amino acid sequence of a B. pertussis protein or peptide, or a variant, homologue, derivative or subsequence thereof, wherein the protein or peptide comprises at least two peptides selected from the amino acid sequences set forth in any one of Tables 1-20 or a subsequence, portion, homologue, variant or derivative thereof, in an amount sufficient to prevent, stimulate, induce, promote, increase, immunize against, or enhance an immune response against B. pertussis in the subject. In one aspect, the immune response provides the subject with protection against B. pertussis infection or pathology, or one or more physiological conditions, disorders, illnesses, diseases or symptoms caused by or associated with B. pertussis infection or pathology.

[0022] In another embodiment, the present invention includes a method of treating, preventing, or immunizing a subject against B. pertussis infection, comprising administering to a subject an amount of a protein or peptide comprising, consisting of, or consisting essentially of an amino acid sequence of a Bordetella protein or peptide, or a variant, homologue, derivative or subsequence thereof, wherein the protein or peptide comprises at least two amino acid sequences selected from any one of Tables 1-20 or a subsequence, portion, homologue, variant or derivative thereof, in an amount sufficient to treat, prevent, or immunize the subject for B. pertussis infection, wherein the protein or peptide comprises or consists of a Bordetella T cell epitope that elicits, stimulates, induces, promotes, increases, or enhances an anti-B. pertussis T cell immune response. In one aspect, the one or more amino acid sequences are selected from any one of those sequences set forth in Tables 1-20, or a subsequence, portion, homologue, variant or derivative thereof; a fusion protein comprising one or more amino acid sequences selected from any one of those sequences set forth in Tables 1-20; or a pool of 2 or more peptides selected from the amino acid sequences set forth in those sequences set forth in any one of Tables 1-20. In one aspect, the anti-B. pertussis T cell response is a CD8+, a CD4+ T cell response, or both. In another aspect, the T cell epitope is conserved across two or more clinical isolates of B. pertussis or two or more circulating forms of B. pertussis. In another aspect, the B. pertussis infection is an acute infection. In another aspect, the subject is a mammal or a human. In another aspect, the method reduces B. pertussis bacterial titer, increases or stimulates B. pertussis bacterial clearance, reduces or inhibits B. pertussis bacterial proliferation, reduces or inhibits increases in B. pertussis bacterial titer or B. pertussis bacterial proliferation, reduces the amount of a B. pertussis bacterial protein or the amount of a B. pertussis bacterial nucleic acid, or reduces or inhibits synthesis of a B. pertussis bacterial protein or a B. pertussis bacterial nucleic acid. In another aspect, the method reduces one or more adverse physiological conditions, disorders, illness, diseases, symptoms or complications caused by or associated with B. pertussis infection or pathology. In another aspect, the method improves one or more adverse physiological conditions, disorders, illness, diseases, symptoms or complications caused by or associated with B. pertussis infection or pathology. In another aspect, the symptom is fever or chills, cough, shortness of breath or difficulty breathing, fatigue, muscle or body aches, headache, new loss of taste or smell, sore throat, congestion or runny nose, nausea or vomiting, or diarrhea. In another aspect, the method reduces or inhibits susceptibility to B. pertussis infection or pathology. In another aspect, the protein or peptide, or a subsequence, portion, homologue, variant or derivative thereof, is administered prior to, substantially contemporaneously with or following exposure to or infection of the subject with B. pertussis. In another aspect, a plurality of B. pertussis T cell epitopes are administered prior to, substantially contemporaneously with or following exposure to or infection of the subject with B. pertussis. In another aspect, the protein or peptide, or a subsequence, portion, homologue, variant or derivative thereof is administered within 2-72 hours, 2-48 hours, 4-24 hours, 4-18 hours, or 6-12 hours after a symptom of B. pertussis infection or exposure develops. In another aspect, the protein or peptide, or a subsequence, portion, homologue, variant or derivative thereof is administered prior to exposure to or infection of the subject with B. pertussis. In another aspect, the method further comprises administering a modulator of immune response prior to, substantially contemporaneously with or following the administration to the subject of an amount of a protein or peptide. In another aspect, the modulator of immune response is a modulator of the innate immune response. In another aspect, the modulator is IL-6, IFN-γ, TGF-3, or IL-10, or an agonist or antagonist thereof.

[0023] In another embodiment, the present invention includes a method of treating, preventing, or immunizing a subject against B. pertussis infection, comprising administering to a subject the composition of one or more proteins, peptides or multimers in an amount sufficient to treat, prevent, or immunize the subject for B. pertussis infection. In one aspect, the B. pertussis infection is an acute infection. In another aspect, the method reduces B. pertussis bacterial titer, increases or stimulates B. pertussis bacterial clearance, reduces or inhibits B. pertussis bacterial proliferation, reduces or inhibits increases in B. pertussis bacterial titer or B. pertussis bacterial proliferation, reduces the amount of a B. pertussis bacterial protein or the amount of a B. pertussis bacterial nucleic acid, or reduces or inhibits synthesis of a B. pertussis bacterial protein or a B. pertussis bacterial nucleic acid. In another aspect, the method reduces one or more adverse physiological conditions, disorders, illness, diseases, symptoms or complications caused by or associated with B. pertussis infection or pathology. In another aspect, the method improves one or more adverse physiological conditions, disorders, illness, diseases, symptoms or complications caused by or associated with B. pertussis infection or pathology. In another aspect, the symptom is fever or chills, cough, shortness of breath or difficulty breathing, fatigue, muscle or body aches, headache, new loss of taste or smell, sore throat, congestion or runny nose, nausea, vomiting, or diarrhea. In another aspect, the method reduces or inhibits susceptibility to B. pertussis infection or pathology. In another aspect, the composition is administered prior to, substantially contemporaneously with or following exposure to or infection of the subject with B. pertussis. In another aspect, the composition is administered prior to, substantially contemporaneously with or following exposure to or infection of the subject with B. pertussis. In another aspect, the composition is administered within 2-72 hours, 2-48 hours, 4-24 hours, 4-18 hours, or 6-12 hours after a symptom of B. pertussis infection or exposure develops. In another aspect, the composition is administered prior to exposure to or infection of the subject with B. pertussis.

[0024] In another embodiment, the present invention includes a peptide or peptides that are immunoprevalent or immunodominant in a bacteria obtained by a method consisting of, or consisting essentially of: obtaining an amino acid sequence of the bacteria; determining one or more sets of overlapping peptides spanning one or more bacteria antigen using unbiased selection; synthesizing one or more pools of bacteria peptides comprising the one or more sets of overlapping peptides; combining the one or more pools of bacteria peptides with Class I major histocompatibility proteins (MHC), Class II MHC, or both Class I and Class II MHC to form peptide-MHC complexes; contacting the peptide-MHC complexes with T cells from subjects exposed to the bacteria; determining which pools triggered cytokine release by the T cells; and deconvoluting from the pool of peptides that elicited cytokine release by the T cells, which peptide or peptides are immunoprevalent or immunodominant in the pool. In one aspect, the bacteria is a Bordetella. In another aspect, the Bordetella is B. pertussis. In another aspect, the immunodominant peptides are selected from 1, 2 or more peptides selected from the amino acid sequences set forth in any one of Tables 1-20. In another aspect, the immunodominant peptides are selected from 1, 2 or more peptides selected from the amino acid sequences set forth in those sequences set forth in any one of Tables 1-20.

[0025] In another embodiment, the present invention includes a method of selecting an immunoprevalent or immunodominant peptide or protein of a bacteria comprising, consisting of, or consisting essentially of: obtaining an amino acid sequence of the bacteria; determining one or more sets of overlapping peptides spanning one or more bacteria antigen using unbiased selection; synthesizing one or more pools of bacteria peptides comprising the one or more sets of overlapping peptides; combining the one or more pools of bacteria peptides with Class I major histocompatibility proteins (MHC), Class II MHC, or both Class I and Class II MHC to form peptide-MHC complexes; contacting the peptide-MHC complexes with T cells from subjects exposed to the bacteria; determining which pools triggered cytokine release by the T cells; and deconvoluting from the pool of peptides that elicited cytokine release by the T cells, which peptide or peptides are immunoprevalent or immunodominant in the pool. In one aspect, the bacteria is a Bordetella. In another aspect, the Bordetella is B. pertussis. In another aspect, the immunodominant peptides are selected from 1, 2 or more peptides selected from the amino acid sequences set forth in any one of Tables 1-20. In another aspect, the immunodominant peptides are selected from 1, 2 or more peptides selected from the amino acid sequences set forth in those sequences set forth in any one of Tables 1-20.

[0026] In another embodiment, the present invention includes a polynucleotide that expresses one or more peptides or proteins, comprising, consisting of, or consisting essentially of an amino acid sequence selected from any one of those sequences set forth in Tables 1-20, or a subsequence, portion, homologue, variant or derivative thereof; a fusion protein comprising one or more amino acid sequences selected from any one of those sequences set forth in Tables 1-20; or a pool of 2 or more or more peptides comprising, consisting of, or consisting essentially of amino acid sequences selected from any one of those sequences set forth in Tables 1-20. In one aspect, the vector comprises the polynucleotide of claim that expresses one or more peptides or proteins, comprising, consisting of, or consisting essentially of an amino acid sequence selected from any one of those sequences set forth in Tables 1-20, or a subsequence, portion, homologue, variant or derivative thereof, a fusion protein comprising one or more amino acid sequences selected from any one of those sequences set forth in Tables 1-20; or a pool of 2 or more or more peptides comprising, consisting of, or consisting essentially of amino acid sequences selected from any one of those sequences set forth in Tables 1-20, a bacterial vector, or a host cell the comprises the same.

[0027] In another embodiment, the present invention includes a polynucleotide that expresses one or more peptides or proteins comprising, consisting of, or consisting essentially of an amino acid sequence selected from any one of those sequences set forth in Tables 1-20, or a subsequence, portion, homologue, variant or derivative thereof, a fusion protein comprising one or more amino acid sequences selected from any one of those sequences set forth in Tables 1-20; or a pool of 2 or more peptides selected from any one of those sequences set forth in Tables 1-20. In one aspect, the vector comprises the polynucleotide of claim that expresses one or more peptides or proteins comprising, consisting of, or consisting essentially of an amino acid sequence selected from any one of those sequences set forth in Tables 1-20, or a subsequence, portion, homologue, variant or derivative thereof, a fusion protein comprising one or more amino acid sequences selected from any one of those sequences set forth in Tables 1-20; or a pool of 2 or more peptides selected from any one of those sequences set forth in Tables 1-20, a bacterial vector, or a host cell that comprises the same.

### BRIEF DESCRIPTION OF THE DRAWINGS

[0028] For a more complete understanding of the features and advantages of the present invention, reference is now made to the detailed description of the invention along with the accompanying figures and in which:

[0029] FIGS. 1A-ID. Schematics of BP whole genome-wide library screening. An example of the entire BP peptide library screening and epitope identification for a representative individual donor using AIM assay is shown. (FIG. 1A) Screening of entire library organized in 133 pools of 188 15-mer peptides (MegaPools; MP). (FIG. 1B) Deconvolution of one positive representative MP (MP #39) into 8 pools of 22-24 individual peptides (MesoPools; MS). (FIG. 1C) Deconvolution of one positive representative MS (MS #39.7) for assessment of individual peptide response (n=24). (FIG. 1D) Overall map of CD4+ T cell reactivity showing the position of each individual epitope identified across the aligned BP genome, using the Tohama I and D420 BP strains as reference. Associated percentage of response (magnitude) for each pool/peptide is indicated in y axis. Dotted lines represent the cut-off value associated with the threshold of positivity (TP).

[0030] FIGS. 2A-2D. Large breadth of BP-specific CD4+ T cell responses in humans. (FIG. 2A) Dominance of epitope response across the entire cohort (n=40) indicated by proportion of donors who responded to the specified number of epitopes. (FIG. 2B) Dominance of antigen response indicated by proportion of donors who responded to the specified number of ORFs. (FIG. 2C) Breadth of epitope response ranked on the basis of % of total response (Black dashed line). Grey dotted lines indicate the top 50, 75 and 90 percent of total response and associated number of epitopes. (FIG. 2D) Breadth of antigen response ranked on the basis of % of total response (Black dashed line). Grey dotted lines indicate the top 50, 75 and 90 percent of total response and associated number of ORFs.

[0031] FIG. 3. Immunodominance of BP specific-CD4+ T cell responses. Overall map of CD4+ T cell responses by antigen (ORF) reactivity across the entire cohort (n=40) showing the position of each individual ORF identified across the aligned BP genome, using the Tohama I and D420 BP strains as reference. Associated percentage of total response (all antigens recognized) for each ORF is indicated in y axis. Each bar represents an individual ORF and annotation of specific antigens is shown (red—aP vaccine antigens; green—dominant non-aP vaccine antigens).

[0032] FIGS. 4A-4F. aP and non-aP vaccine antigens are similarly recognized in aP- and wP-primed donors. Graphs show comparison of responses between aP- and wP-primed donors in terms of (FIGS. 4A,4D) magnitude, (FIGS. 4B,4E) number of epitopes, and (FIGS. 4C,4F) number of ORFs for aP vaccine antigens (Grey triangles, upper panel) or non-aP vaccine antigens (Grey circles, bottom panel), respectively. Each symbol denotes an individual donor (n=40; 20 in each group). Bars represent geometric mean±geometric SD. p values calculated by Mann-Whitney statistical analysis are indicated.

[0033] FIGS. 5A-5L. Sequence conservation is not a major driver of immunogenicity. Peptide homology amongst different BP strains or Bordetella genus was evaluated for the entire se of peptides tested in this study. (FIG. 5A) percent of homology across different BP strains for non-reactive, subdominant or dominant non-aP vaccine derived peptides (FIG. 5B) percent of dominant peptides across different BP strains for peptide conservation in non-Ap vaccine derived peptides. (FIG. 5C) percent of variable peptides across different BP strains for non-reactive, subdominant or dominant non-Ap vaccine derived peptides. (FIG. 5D) percent of homology across different BP strains for non-reactive, subdominant or dominant aP vaccine derived peptides. (FIG. 5E) percent of dominant peptides across different BP strains for peptide conservation in aP vaccine derived peptides. (FIG. 5F) percent of conserved peptides across different BP strains for non-reactive, subdominant or dominant aP vaccine derived peptides. (FIG. 5G) percent of homology across different Bordetella for non-reactive, subdominant or dominant non-aP vaccine derived peptides. (FIG. 5H) percent of dominant peptides across different Bordetella for peptide conservation in non-aP vaccine derived peptides. (FIG. 5I) percent of variable peptides across different Bordetella for non-reactive, subdominant or dominant non-Ap vaccine derived peptides. (FIG. 5J) percent of homology across different Bordetella for non-reactive, subdominant or dominant aP vaccine derived peptides. (FIG. 5K) percent of dominant peptides across different Bordetella for peptide conservation in aP vaccine derived peptides. (FIG. 5L) percent of variable peptides across different Bordetella for non-reactive, subdominant or dominant aP vaccine derived peptides. p values calculated by Kruskal-Wallis test adjusted with Dunn's test for multiple comparisons are indicated.

[0034] FIGS. 6A-6C. Th2 polarization is specific to the aP vaccine antigens, in individuals originally primed with aP vaccine. Antigen specific CD4+ T cell responses from aP and non-aP vaccine antigens were detected with PT(E)VAC and PT(E)R peptide pools respectively. (FIG. 6A) percentage of AIM+(OX40+CD25+) CD4+ T cells after stimulation of PBMCs with peptide pools (n=20). (FIG. 6B) percentage of ICS+cytokine+ (CD154+) CD4+ T cells after stimulation of PBMCs with peptide pools (n=40). Black dotted lines represent the cut-off value associated with the threshold of positivity (TP) and percentage of donor recognition is indicated for each stimuli. (FIG. 6C) Polarization of CD4+ T cell responses represented as ratio of IFNγ/IL-4 cytokine response for each individual pool (n=40; 20 for aP and 20 for wP groups). Red dotted line indicates a Ratio=1. In all graphs, each circle represents a donor. Tick black lines represent geometric mean±geometric SD, and p values were calculated by Mann-Whitney.

[0035] FIGS. 7A-7C. non-aP vaccine antigen responses are not polarized as function of priming childhood vaccination. Antigen specific CD4+ T cell responses from 15 individual non-aP vaccine antigens were detected with overlapping (O) peptide pools and represented as the sum of all MPs responses (PT(0)1-15) or as each individual MP response (ANT1-ANT15). PT(E)VAC pool was used as control respectively. (FIG. 7A) percentage of AIM+ (OX40+CD25+) CD4+ T cells after stimulation of PBMCs with peptide pools (n=20). (FIG. 7B) percentage of ICS+cytokine+ (CD154+) CD4+ T cells after stimulation of PBMCs with peptide pools (PT(E)VAC, n=40; PT(O)1-15, n=20; ANT1, 3, 8, and 9, n=34; all other ANT, n=20). Black dotted lines represent the cut-off value associated with the threshold of positivity (TP) and percentage of donor recognition is indicated for each stimuli. (FIG. 7C) Polarization of CD4+ T cell responses represented as ratio of IFNγ/IL-4 cytokine response for each individual pool (n=34; 17 for aP and 17 for wP groups). Red dotted line indicates a Ratio=1. In all graphs, each circle represents a donor. Tick black lines represent geometric mean±geometric SD, and p values were calculated by Mann-Whitney.

[0036] FIG. 8. Schematic of BP genome-wide screening and summary of experimental design and strategy. CD4+ T cell reactivity spanning the entire BP proteome was assayed with a library of 24,877 peptides in 3 sequential steps, directly ex vivo using a high throughput Activation Induced Marker (AIM) assay flow cytometry methodology. Dot plots in the bottom right, show representative AIM+ CD4+ T cell responses after stimulation with a single peptide (red box) or with negative (DMSO) and positive (PHA) controls.

[0037] FIGS. 9A-9B. Immunodominance is associated with both magnitude and donor recognition. (FIG. 9A) Overall map of CD4+ T cell responses at antigen (ORF) level by percent of total magnitude (black bars, left axis) or percent of donor recognition (grey bars, right axis), across the entire cohort (n=40). Each bar represents an individual ORF identified across the aligned BP genome, using the Tohama I and D420 BP strains as reference. Dotted line represents a frequency of recognition of 5%. (FIG. 9B) Graph shows correlation between percentages of total magnitude and donor recognition. Each circle represents an individual ORF. R and p value expresses Spearman's rank correlation coefficient test.

[0038] FIGS. 10A-10B. Immunodominant most reactive antigens have the longest sequences. Graphs shows correlation between protein size (kDa) and (FIG. 10A) percent of total antigen reactivity or (FIG. 10B) percent of donor recognition. Each circle represents responses of each of the 15 immunodominant overlapping peptide pools tested by AIM assay across all donors (n=20). R and p values express Spearman's rank correlation coefficient test and the best fit is represented by a linear regression line (red).

[0039] FIG. 11. Illustrative flow cytometry gating strategy for the assessment of antigen-specific CD4+ T cell responses by AIM and ICS assays. Representative gating of reactive OX40+CD25+ and cytokine+(IFNγ, IL-2, TNFα and IL-4) CD154+ CD4+ T cells from donor PBMCs is shown. Briefly, for both AIM and ICS, mononuclear cells were gated out of all events followed by subsequent singlet gating. Live CD3+ cells were gated as Live/Dead−CD14−CD8−CD19-CD3+. Cells were then gated as CD4+CD3+. For AIM assay, antigen-specific cells were defined as OX40+CD25+ CD4+ T cells (AIM+) after antigen stimulation, and frequencies calculated as percent of total CD4+ T cells after background subtraction. For ICS assay, antigen-specific cytokine producing cells were defined as Cytokine+ and CD154+ CD4+ T cells after antigen stimulation, and frequencies calculated as percent of total CD4+ T cells after background subtraction.

[0040] FIGS. 12A-12C. Experimentally defined epitope pools (PT(E)VAC and PT(E)R) detect BP-specific responses in vaccinated subjects primed with acellular (aP) or whole-cell (wP) vaccines in childhood.

[0041] FIG. 13. Novel identified antigens have equal or higher reactivity than aP vaccine antigens.

[0042] FIG. 14. Overlapping peptide pools derived from the 19 most immunodominant antigens not contained in the aP vaccine, can be used to detect BP-specific responses.

### DETAILED DESCRIPTION OF THE INVENTION

[0043] While the making and using of various embodiments of the present invention are discussed in detail below, it should be appreciated that the present invention provides many applicable inventive concepts that can be embodied in a wide variety of specific contexts. The specific embodiments discussed herein are merely illustrative of specific ways to make and use the invention and do not delimit the scope of the invention. Numerous variations, changes, and substitutions will now occur to those skilled in the art without departing from the invention. It should be understood that various alternatives to the embodiments of the invention described herein may be employed in practicing the invention. To facilitate the understanding of this invention, a number of terms are defined below. Terms defined herein have meanings as commonly understood by a person of ordinary skill in the areas relevant to the present invention. Terms such as “a”, “an” and “the” are not intended to refer to only a singular entity, but include the general class of which a specific example may be used for illustration. The terminology herein is used to describe specific embodiments of the invention, but their usage does not delimit the invention, except as outlined in the claims. Unless specifically stated or obvious from context, as used herein, the term “or” is understood to be inclusive.

### Example 1

[0044] Bordetella pertussis (BP), the causative agent of whooping cough, infects human hosts' lungs and upper airways. The recent increase in cases of whooping cough in the US suggests that the current administered BP acellular (aP) vaccine, which replaced a whole-cell (wP) vaccine in the early 90s, might have limitations in the quality and effectiveness of protection. Previously, the inventors have demonstrated that detection and quantification of BP-specific CD4+ T cells to antigens currently included in aP vaccines can be easily and rapidly achieved with high sensitivity and specificity in a variety of different T cell assays through the use of a peptide pool to stimulate PBMCs (Dan et al., J Immunol 2016, da Silva Antunes et al., JCI 2018, Silva Antunes et al., Cytokine 2021). In particular, stemming from experimentally characterized epitopes (Bancroft et al., Cell Immunol 2016), a set of 132 peptides derived from aP vaccine antigens were defined [PT(E)VAC]. The antigens included are the filamentous hemagglutinin (FHA), pertactin (PRN), pertussis toxin (PT), and fimbrial proteins 2 and 3 (Fim2/3). Recently, the inventors have performed the first full genome screening of human T cell reactivity to BP to identify novel targets and provide knowledge towards the direction of a new and improved BP vaccine design (da Silva Antunes et al., JIR, 2020, and da Silva Antunes et al. in preparation). The study readily and unbiasedly detected reactivity to epitopes and antigens currently included in the aP vaccine and, in addition, identified many other epitopes and antigens not included in aP vaccines. Importantly, the inventors have identified 19 antigens with reactivity as prominent or even more immunodominant than the aP vaccine antigens. These discoveries enabled the unique opportunity to generate epitope pools to characterize and discriminate responses specific to aP vaccine antigens from other immunodominant and immunogenic BP antigens not contained in aP vaccines. Specifically, and in addition to the [PT(E)VAC]epitope pool (Table 1), the inventors generated a new epitope pool of 170 experimentally defined peptides covering the most immunogenic peptides across the entire BP genome, and not containing aP vaccine antigens [PT(E)R](Table 2). In parallel, to establish the patterns of immunodominance of different BP antigens, the inventors further generated 19 sets of BP-specific CD4+ T cells epitopes pools using overlapping peptides covering the entire sequence of the novel antigens. The inventors tested the sensitivity and performance of the BP-specific peptide pools after short-culture stimulation of PBMCs using activation induced marker (AIM) and intracellular cellular staining (ICS) assays. PBMCs were obtained from 2 distinct cohorts including aP- or wP-primed individuals in childhood. The previous and new epitope pools will allow studying BP-specific responses in aP vaccination or boost settings and in the context of whole-cell vaccination schemes, exposition/colonization, infection, and human challenge studies.

[0045] TABLE 1. PT(E)VAC—Acelullar vaccine B. pertussis Megapool—Peptides defined based on threshold of magnitude from the 5 known vaccine antigens responses.

TABLE 1
PT(E)VAC-Acelullar vaccine B. pertussis Megapool-
Peptides defined based on threshold of magnitude
from the 5 known vaccine antigens responses

| SEQ ID NO: | Sequence | Pool no. |
|---|---|---|
| 1 | GADLIIANPNGISVNG | 2 |
| 2 | VVARLVKLQGAVSSKQ | 2 |
| 3 | GKPLADIAVVAGANRY | 2 |
| 4 | VVAGANRYDHATRRAT | 2 |
| 5 | DHATRRATPIAAGARG | 2 |
| 6 | SSDSGLGVRQLGSLSS | 2 |
| 7 | RQLGSLSSPSAITVSS | 2 |
| 8 | GQVRATSAGAMTVRDV | 5 |
| 9 | GFLKSAGAMTVNGRDA | 5 |
| 10 | VRLDGAHAGGQLRVSS | 5 |
| 11 | VAELKSLDNISVTGGE | 5 |
| 12 | NISVTGGERVSVQSVN | 5 |
| 13 | RVSVQSVNSASRVAIS | 5 |
| 14 | IDVRGGSTVAANSLHA | 6 |
| 15 | RSMTLGIVDTTGDLQA | 7 |
| 16 | SASRARIDSTGSVGIG | 7 |
| 17 | KVAKKLFLNGTLRAVN | 8 |
| 18 | SVVSDAALVADGGPIV | 8 |
| 19 | QRIEAQRIENRGTFQS | 9 |
| 20 | AAQVTQRGGAANLTSR | 9 |
| 21 | HDTRFSNKIRLMGPLQ | 9 |
| 22 | IRLMGPLQVNAGGAVS | 10 |
| 23 | TSRGGFDNEGKMESNK | 10 |
| 24 | FTVQAQRIDNSGTMAA | 10 |
| 25 | PHLRNTGQVVAGHDIH | 11 |
| 26 | VVAGHDIHIINSAKLE | 11 |
| 27 | IINSAKLENTGRVDAR | 11 |
| 28 | NDIALDVADFTNTGSL | 11 |
| 29 | DFTNTGSLYAEHDATL | 11 |
| 30 | ILPVAEGTLRVKAKSL | 11 |
| 31 | LRVKAKSLTTEIETGN | 11 |
| 32 | PGSLIAEVQENIDNKQ | 11 |
| 33 | VANEANALLWAAGELT | 11 |
| 34 | LWAAGELTVKAQNITN | 11 |
| 35 | VKAQNITNKRAALIEA | 11 |
| 36 | AVALLNKLGRIRAGED | 12 |
| 37 | MHLDAPRIENTAKLSG | 12 |
| 38 | GKKAGTIAAPWYGGDL | 12 |
| 39 | VGKDLYLNAGARKDEH | 12 |
| 40 | ELLDYLLDQNRYEYIW | 13 |
| 41 | QNRYEYIWGLYPTYTE | 13 |
| 42 | RGHTLESAEGRKIFGE | 13 |
| 43 | EGRKIFGEYKKLQGEY | 13 |
| 44 | GGMDAETKEVDGIIQE | 13 |
| 45 | EVDGIIQEFAADLRTV | 13 |
| 46 | FAADLRTVYAKQADQA | 13 |
| 47 | VAQRYKSQIDAVRLQA | 14 |
| 48 | IDAVRLQAIQPGRVTL | 14 |
| 49 | IQPGRVTLAKALSAAL | 14 |
| 50 | GAEIAFYPKEQTVLAA | 14 |
| 51 | GAIHNGENAAQNRGRP | 14 |
| 52 | DALAAVLVNPHIFTRI | 14 |
| 53 | NPHIFTRIGAAQTSLA | 14 |
| 54 | LASLASLDAAQGLEVS | 15 |
| 55 | AARVAGDNYFDTTLVR | 15 |
| 56 | GKPLADIAVIAGANRY | 24 |
| 57 | HADDGTIVITGTITDT | 25 |
| 58 | VQVRISNLNDSKITMG | 26 |
| 59 | TMRYLASYVKKNGDVE | 26 |
| 60 | EASAITTYVGFSVVYP | 26 |
| 61 | ANDGTIVITGSISDQT | 27 |
| 62 | FRLANLNGQHIRMGTD | 28 |
| 63 | SKSYTLRYLASYVKKP | 28 |
| 64 | DAAQITSYVGFSVVYP | 28 |
| 65 | TTLAMALGALGAAPAA | 29 |
| 66 | ALGAAPAAHADWNNQS | 29 |
| 67 | HADWNNQSIVKTGERQ | 29 |
| 68 | IVKTGERQHGIHIQGS | 29 |
| 69 | HGIHIQGSDPGGVRTA | 29 |
| 70 | GRQAQGILLENPAAEL | 29 |
| 71 | GIRRFLGTVTVKAGKL | 29 |
| 72 | VTVKAGKLVADHATLA | 29 |
| 73 | NVGDTWDDDGIALYVA | 29 |
| 74 | DGIALYVAGEQAQASI | 29 |
| 75 | GEQAQASIADSTLQGA | 29 |
| 76 | ADSTLQGAGGVQIERG | 29 |
| 77 | GGVQIERGANVTVQRS | 30 |
| 78 | ANVTVQRSAIVDGGLH | 30 |
| 79 | PEDLPPSRVVLRDTNV | 30 |
| 80 | VVLRDTNVTAVPASGA | 30 |
| 81 | TAVPASGAPAAVSVLG | 30 |
| 82 | GHITGGRAAGVAAMQG | 30 |
| 83 | AGVAAMQGAVVHLQRA | 30 |
| 84 | AVVHLQRATIRRGDAP | 30 |
| 85 | TIRRGDAPAGGAVPGG | 30 |
| 86 | AGGAVPGGAVPGGAVP | 30 |
| 87 | AVPGGAVPGGFGPGGF | 30 |
| 88 | GPVLDGWYGVDVSGSS | 30 |
| 89 | VELAQSIVEAPELGAA | 30 |
| 90 | EAPELGAAIRVGRGAR | 30 |
| 91 | SAPHGNVIETGGARRF | 31 |
| 92 | ETGGARRFAPQAAPLS | 31 |
| 93 | APQAAPLSITLQAGAH | 31 |
| 94 | AQGKALLYRVLPEPVK | 31 |
| 95 | SIGPLDVALASQARWT | 31 |
| 96 | LASQARWTGATRAVDS | 31 |
| 97 | GATRAVDSLSIDNATW | 31 |
| 98 | LSIDNATWVMTDNSNV | 31 |
| 99 | AEAGRFKVLTVNTLAG | 31 |
| 100 | LTVNTLAGSGLFRMNV | 31 |
| 101 | RNSGSEPASANTLLLV | 32 |
| 102 | PAGRELSAAANAAVNT | 32 |
| 103 | LFDDGIRRFLGTVTVK | 35 |
| 104 | AGGGVPGGAVPGGAVP | 35 |
| 105 | VYRYDSRPPEDVFQNG | 36 |
| 106 | NVLDHLTGRSCQVGSS | 36 |
| 107 | NSAFVSTSSSRRYTEV | 36 |
| 108 | SSRRYTEVYLEHRMQE | 36 |
| 109 | YLEHRMQEAVEAERAG | 36 |
| 110 | SYFEYVDTYGDNAGRI | 36 |
| 111 | YGDNAGRILAGALATY | 36 |
| 112 | LAGALATYQSEYLAHR | 36 |
| 113 | QSEYLAHRRIPPENIR | 37 |
| 114 | RIPPENIRRVTRVYHN | 37 |
| 115 | RVTRVYHNGITGETTT | 37 |
| 116 | GITGETTTTEYSNARY | 37 |
| 117 | PNPYTSRRSVASIVGT | 37 |
| 118 | WSERAGEAMVLVYYES | 37 |
| 119 | GEAMVLVYYESIAYSF | 37 |
| 120 | SVASIVGTLVRMAPVM | 37 |
| 121 | YYSNVTATRLLSSTNS | 39 |
| 122 | RLCAVFVRSGQPVIGA | 39 |
| 123 | SGQPVIGACTSPYDGK | 39 |
| 124 | CTSPYDGKYWSMYSRL | 39 |
| 125 | YWSMYSRLRKMLYLIY | 39 |
| 126 | RKMLYLIYVAGISVRV | 39 |
| 127 | HVSKEEQYYDYEDATF | 39 |
| 128 | TQHGSPYGRCANKTRA | 39 |
| 129 | HYYSKVTATRLLASTN | 41 |
| 130 | SRLCAVFVRDGQSVIG | 41 |
| 131 | VHVSKEEQYYDYEDAT | 41 |
| 132 | VYKYDSRPPEDVFONG | 44 |

[0046] TABLE 2. PT(E)R—Novel B. pertussis Megapool—Peptides defined based on the threshold of magnitude from novel and previously uncharacterized antigen responses.

TABLE 2
PT(E)R-Novel B. pertussis Megapool-Peptides defined based on the threshold of magnitude
from novel and previously uncharacterized antigen responses

| SEQ | | |
|---|---|---|
| ID | | |
| NO: | Peptide Sequence | ORF Description |
| 133 | MGVDGLRLDAVPYLV | NP_880087.1 malto-oligosyltrehalose trehalohydrolase [B. |
| | | pertussis Tohama I] |
| 134 | LMPEFISSLAIAGVD | NP_879836.1 D-alanyl-D-alanine carboxypeptidase [B. pertussis |
| | | Tohama I] |
| 135 | LSLVVQEINGPRLAT | NP_879836.1 D-alanyl-D-alanine carboxypeptidase [B. pertussis |
| | | Tohama I] |
| 136 | RLLFTPDAAARKWVP | NP_879836.1 D-alanyl-D-alanine carboxypeptidase [B. pertussis |
| | | Tohama I] |
| 137 | AMKRAMQNAMRLGA | NP_882129.1 30S ribosomal protein S3 [B. pertussis Tohama I] |
| | Q | |
| 138 | FTHIELLPVMAHPFG | NP_880086.1 1,4-alpha-glucan (glycogen) branching enzyme |
| 139 | IQRFVQAWPVVSSRL | NP_881595.1 cell division protein FtsQ [B. pertussis Tohama I] |
| 140 | QTPFHLVSSERSLTG | NP_879348.1 membrane protein insertase YidC [B. pertussis |
| | | Tohama I] |
| 141 | NGFITAYAHNRALLV | NP_880436.1 peptidase [B. pertussis Tohama I] |
| 142 | MEVFYGTVAVRVPLS | NP_882154.1 thiol:disulfide interchange protein [B. pertussis |
| | | Tohama I] |
| 143 | ALLRELRLRGVKQIG | NP_879836.1 D-alanyl-D-alanine carboxypeptidase [B. pertussis |
| | | Tohama I] |
| 144 | PWILWVHDLSVRDPF | NP_879348.1 membrane protein insertase YidC [B. pertussis |
| | | Tohama I] |
| 145 | ASVMKLVTTWAALSE | NP_879836.1 D-alanyl-D-alanine carboxypeptidase [B. pertussis |
| | | Tohama I] |
| 146 | FTGVVDLVKMKAIIW | NP_882120.1 elongation factor G [B. pertussis Tohama I] |
| 147 | IRSRIKVKSLNFMRG | NP_881388.1 hypothetical protein BP2788 [B. pertussis Tohama I] |
| 148 | VKRFGRFVGRRRNER | NP_882125.1 50S ribosomal protein L23 [B. pertussis Tohama I] |
| 149 | MMVRFFVSIGVLAWA | NP_879841.1 membrane protein [B. pertussis Tohama I] |
| 150 | SRAILLSTVLSVPTI | NP_882038.1 membrane protein [B. pertussis Tohama I] |
| 151 | QEYVFLTYALDSDVI | NP_881891.1 hypothetical protein BP3358 [B. pertussis Tohama I] |
| 152 | VVLALVRNALGVQQV | NP_880884.1 type III secretion system protein [B. pertussis |
| | | Tohama I] |
| 153 | GWLTIIAKPLFTLMT | NP_879348.1 membrane protein insertase YidC [B. pertussis |
| | | Tohama I] |
| 154 | AIAWLVVAARAWRR | NP_882241.1 membrane protein [B. pertussis Tohama I] |
| | R | |
| 155 | ENLKADLQRLMGVPV | NP_882129.1 30S ribosomal protein S3 [B. pertussis Tohama I] |
| 156 | IAYRLLTHNRALTLF | NP_880300.1 DNA mismatch repair protein MutS [B. pertussis |
| | | Tohama I] |
| 157 | QVLREVLGAMRYWL | NP_880087.1 malto-oligosyltrehalose trehalohydrolase [B. |
| | D | pertussis Tohama I] |
| 158 | VPSLSILAEPPVAVV | NP_879766.1 sulfate-binding protein [B. pertussis Tohama I] |
| 159 | SGGLKVTKTYTLHRG | NP_879348.1 membrane protein insertase YidC [B. pertussis |
| | | Tohama I] |
| 160 | TAVCFLLSLETAMRS | NP_879354.1 integrase [B. pertussis Tohama I] |
| 161 | VEVRPVRRLALAMRW | NP_882119.1 30S ribosomal protein S7 [B. pertussis Tohama I] |
| 162 | LPKAFSIYRDTRVWI | NP_881188.1 recombination-associated protein [B. pertussis |
| | | Tohama I] |
| 163 | HPTGFRLAVTRNWTS | NP_882129.1 30S ribosomal protein S3 [B. pertussis Tohama I] |
| 164 | RLMGLPHYHRLLYAL | NP_881082.1 membrane efflux protein [B. pertussis Tohama I] |
| 165 | TFTPIQVASIAALDG | NP_881385.1 aminotransferase [B. pertussis Tohama I] |
| 166 | MSRHAIRSTLAGLTL | NP_880438.1 exported protein [B. pertussis Tohama I] |
| 167 | HAGPAFKGNVTLAIE | NP_881862.1 inner membrane protein [B. pertussis Tohama I] |
| 168 | KAVFFPLAAASYRSM | NP_879348.1 membrane protein insertase YidC [B. pertussis |
| | | Tohama I] |
| 169 | GLPLTLILATFGIAL | NP_882327.1 amino acid ABC transporter permease [B. |
| | | pertussis Tohama I] |
| 170 | TPRLILEGATAHNLN | NP_881788.1 excinuclease ABC subunit [B. pertussis Tohama I] |
| 171 | MPYLNLIPNPAPPFV | NP_879614.1 hypothetical protein BP0799 [B. pertussis Tohama I] |
| 172 | ERRYIIAPRGLEVGA | NP_882126.1 50S ribosomal protein L2 [B. pertussis Tohama I] |
| 173 | DLKSILIIGAGPIII | NP_880195.1 carbamoyl phosphate synthase large subunit [B. |
| | | pertussis Tohama I] |
| 174 | IFGRDFNEALVHQIV | NP_882124.1 50S ribosomal protein L4 [B. pertussis Tohama I] |
| 175 | RIPWLDVIPGAIVTA | NP_882012.1 serum resistance protein [B. pertussis Tohama I] |
| 176 | CQMALMENAISRYLN | NP_881186.1 hypothetical protein BP2559 [B. pertussis Tohama I] |
| 177 | MKRTYQPSVTRRKRT | NP_879345.1 50S ribosomal protein L34 [B. pertussis Tohama I] |
| 178 | VRAVAGYVLGASGKR | NP_879836.1 D-alanyl-D-alanine carboxypeptidase [B. pertussis |
| | | Tohama I] |
| 179 | QAYLEYLYTPAAQEI | NP_879766.1 sulfate-binding protein [B. pertussis Tohama I] |
| 180 | GDSWGVLFSHPADFT | NP_879765.1 antioxidant protein [B. pertussis Tohama I] |
| 181 | LSSIALAESNALDKR | NP_882013.1 BrkA autotransporter [B. pertussis Tohama I] |
| 182 | QIRLPHLRDIGALLT | NP_882012.1 serum resistance protein [B. pertussis Tohama I] |
| 183 | KKVRLTITYPASTGR | NP_879765.1 antioxidant protein [B. pertussis Tohama I] |
| 184 | LRVVKVVYFDDPVDQ | NP_879664.1 NADH-quinone oxidoreductase subunit N [B. |
| | | pertussis Tohama I] |
| 185 | QRSILSLNGALILVL | NP_879664.1 NADH-quinone oxidoreductase subunit N [B. |
| | | pertussis Tohama I] |
| 186 | AGRGLFVSGTLARLM | NP_882010.1 NADH dehydrogenase [B. pertussis Tohama I] |
| 187 | QAKVMMIMPLVFGG | NP_879348.1 membrane protein insertase YidC [B. pertussis |
| | M | Tohama I] |
| 188 | DFTRLMHANGRIIAA | NP_881952.1 amidase [B. pertussis Tohama I] |
| 189 | EGVVVAPSRLKSLVI | NP_881684.1 hypothetical protein BP3118 [B. pertussis Tohama I] |
| 190 | SLNFMRGRTFLNKYL | NP_881388.1 hypothetical protein BP2788 [B. pertussis Tohama I] |
| 191 | MNAERLMQVILAPIV | NP_882125.1 50S ribosomal protein L23 [B. pertussis Tohama I] |
| 192 | LDGNGVFVLNTNVAA | NP_882013.1 BrkA autotransporter [B. pertussis Tohama I] |
| 193 | GWFTMKFVWPPLTKA | NP_881826.1 ATP synthase subunit B [B. pertussis Tohama I] |
| 194 | FSLYRLALSQPEYAS | NP_879836.1 D-alanyl-D-alanine carboxypeptidase [B. pertussis |
| | | Tohama I] |
| 195 | TLGLYHYRHRRVPDY | NP_879666.1 TonB-dependent receptor BfrD [B. pertussis |
| | | Tohama I] |
| 196 | GMPITRFLNAVRVAL | NP_881737.1 GntR family transcriptional regulator [B. pertussis |
| | | Tohama I] |
| 197 | NNIRGILKTTAVKAP | NP_882014.1 molecular chaperone GroEL [B. pertussis Tohama I] |
| 198 | KAMLEDIAILTGGTV | NP_882014.1 molecular chaperone GroEL [B. pertussis Tohama I] |
| 199 | DYVVRLHSKLTPASL | NP_879346.1 ribonuclease P protein component [B. pertussis |
| | | Tohama I] |
| 200 | SKIAIAMTKAFLAVN | NP_881559.1 ribonucleotide-diphosphate reductase subunit |
| | | alpha [B. pertussis Tohama I] |
| 201 | KSKYAIDWSPFLGAK | NP_879903.1 2-oxoglutarate dehydrogenase complex subunit E1 |
| | | [B. pertussis Tohama I] |
| 202 | DLLWVRLNWARLRR | NP_879541.1 phospholipase [B. pertussis Tohama I] |
| | H | |
| 203 | LVCSLLNLLPPAWII | NP_881921.1 inner membrane protein [B. pertussis Tohama I] |
| 204 | GLTWFAVLGSHAALQ | NP_880533.1 hypothetical protein BP1830 [B. pertussis Tohama I] |
| 205 | VGRIYRADAKQKKML | NP_879878.1 amino acids binding protein [B. pertussis |
| | | Tohama I] |
| 206 | PFVRDGNLLYISGQV | NP_880545.1 hypothetical protein BP1843 [B. pertussis Tohama I] |
| 207 | GYTLLFVAVTSAINQ | NP_880586.1 exported protein [B. pertussis Tohama I] |
| 208 | LDMLLFDRSGHRAAL | NP_880332.1 LysR family transcriptional regulator [B. pertussis |
| | | Tohama I] |
| 209 | MKRYHVDANQARRV | NP_879857.1 exopolyphosphatase [B. pertussis Tohama I] |
| | R | |
| 210 | EKIYVVQTSISVVQR | NP_881682.1 modification methylase [B. pertussis Tohama I] |
| 211 | VRRLGVIAINTALEF | NP_880701.1 acyl-CoA transferase [B. pertussis Tohama I] |
| 212 | FLIGILLILVFGVQL | NP_882302.1 transport system permease [B. pertussis Tohama I] |
| 213 | EVWLAADSSKFQRQA | NP_881259.1 glycerol-3-phosphate regulon repressor protein [B. |
| | | pertussis Tohama I] |
| 214 | MSWHWIFLINIPIGI | NP_882322.1 hypothetical protein BP3824 [B. pertussis Tohama I] |
| 215 | SLLAMLARAHDSPLT | NP_882289.1 type IV secretion system protein PtIC [B. pertussis |
| | | Tohama I] |
| 216 | MCDFYAVRAENSTLW | NP_880653.1 4-aminobutyrate aminotransferase [B. pertussis |
| | | Tohama I] |
| 217 | PDKFDIVVPSLSILA | NP_879766.1 sulfate-binding protein [B. pertussis Tohama I] |
| 218 | VWGPASLIVSKPIWN | NP_880562.1 exported protein [B. pertussis Tohama I] |
| 219 | LGRLGLRFGRRIALA | NP_882013.1 BrkA autotransporter [B. pertussis Tohama I] |
| 220 | LFPIFADLTGRRVLV | NP_879840.1 siroheme synthase [B. pertussis Tohama I] |
| 221 | AHWDFLAAMASADL | NP_880700.1 LysR family transcriptional regulator [B. pertussis |
| | G | Tohama I] |
| 222 | AERYRFFSYGDAMFI | NP_879835.1 S-adenosylmethionine -tRNA ribosyltransferase- |
| | | isomerase [B. pertussis Tohama I] |
| 223 | AGIQIFQLAETLQSL | NP_881678.1 MerR family transcriptional regulator [B. pertussis |
| | | Tohama I] |
| 224 | AAMLIEIKSRMLLPV | NP_882320.1 hypothetical protein BP3822 [B. pertussis Tohama I] |
| 225 | RPRLLAMIRSVRDHM | NP_879389.1 transcriptional regulator [B. pertussis Tohama I] |
| 226 | QAQLRSIEAAIATYR | NP_879580.1 cyclolysin secretion protein CyaD [B. pertussis |
| | | Tohama I] |
| 227 | GEGYVFYENRAYGVA | NP_879578.1 bifunctional hemolysin-adenylate cyclase [B. |
| | | pertussis Tohama I] |
| 228 | RVAFDGAEPRLVDTS | NP_880233.1 threonine--tRNA ligase [B. pertussis Tohama I] |
| 229 | ANRFLRRLWALGYAQ | NP_880711.1 leucine--tRNA ligase [B. pertussis Tohama I] |
| 230 | IGRDYASQIAAVRVV | NP_882331.1 cell division protein FtsX [B. pertussis Tohama I] |
| 231 | LPVMLLADSGLAADR | NP_880325.1 hypothetical protein BP1592 [B. pertussis Tohama I] |
| 232 | IRIDLRNIRSPIIVF | NP_879799.1 hypothetical protein BP1005 [B. pertussis Tohama I] |
| 233 | TGLFIVACAAFTPVT | NP_882322.1 hypothetical protein BP3824 [B. pertussis Tohama I] |
| 234 | WLFLKMLEKGIAYRK | NP_880711.1 leucine--tRNA ligase [B. pertussis Tohama I] |
| 235 | GQIDMMFAQLPAVLP | NP_882177.1 exported protein [B. pertussis Tohama I] |
| 236 | VFFLKYLLSSQSAIL | NP_882160.1 cytochrome c asssembly protein [B. pertussis |
| | | Tohama I] |
| 237 | SGMRRFWKPSLALVW | NP_882327.1 amino acid ABC transporter permease [B. |
| | | pertussis Tohama I] |
| 238 | RAILLKRHNSGFWLI | NP_881921.1 inner membrane protein [B. pertussis Tohama I] |
| 239 | GVLLLQDMAAIPMLV | NP_881082.1 membrane efflux protein [B. pertussis Tohama I] |
| 240 | LELVVDYGWLTIIAK | NP_879348.1 membrane protein insertase YidC [B. pertussis |
| | | Tohama I] |
| 241 | AKYQEIVKISGASLN | NP_882325.1 exported protein [B. pertussis Tohama I] |
| 242 | TALVAERTLILSLVT | NP_881551.1 integral membrane protein [B. pertussis Tohama I] |
| 243 | YQRIQYNTVVSACMK | NP_880711.1 leucine--tRNA ligase [B. pertussis Tohama I] |
| 244 | IKPVFALSSYRTKES | NP_881685.1 integrase [B. pertussis Tohama I] |
| 245 | YSSLNVAQALQLAAW | NP_880587.1 methyltransferase [B. pertussis Tohama I] |
| 246 | LGEFALTRTFKGHAA | NP_882127.1 30S ribosomal protein S19 [B. pertussis Tohama I] |
| 247 | GYRYRAVDALLTNFH | NP_879835.1 S-adenosylmethionine--tRNA ribosyltransferase- |
| | | isomerase [B. pertussis Tohama I] |
| 248 | QRLALIVDPMLATGG | NP_879837.1 uracil phosphoribosyltransferase [B. pertussis |
| | | Tohama I] |
| 249 | PLPGMYRDIARRYDV | NP_878949.1 D-glycero-beta-D-manno-heptose-1,7- |
| | | bisphosphate 7-phosphatase |
| 250 | LYQGLELGASTRIAR | NP_882171.1 ferric siderophore receptor [B. pertussis Tohama I] |
| 251 | AVQLMTVHAAKGLEF | NP_880471.1 DNA helicase II [B. pertussis Tohama I] |
| 252 | HGMKILDGALAKVAK | NP_880538.1 alanine--tRNA ligase [B. pertussis Tohama I] |
| 253 | ALFVTQSTVSKMIRQ | NP_880700.1 LysR family transcriptional regulator [B. pertussis |
| | | Tohama I] |
| 254 | ADVRPLRSATVQRLV | NP_879848.1 hypothetical protein BP1063 [B. pertussis Tohama I] |
| 255 | GAVPFLLAMLLQVGF | NP_882322.1 hypothetical protein BP3824 [B. pertussis Tohama I] |
| 256 | ILGFFIIAALDALRV | NP_880430.1 permease [B. pertussis Tohama I] |
| 257 | RRGELVRVLPDWRSP | NP_879350.1 LysR family transcriptional regulator [B. pertussis |
| | | Tohama I] |
| 258 | SYRSMARMKQVAPRL | NP_879348.1 membrane protein insertase YidC [B. pertussis |
| | | Tohama I] |
| 259 | GALNGILRGVQQPII | NP_879578.1 bifunctional hemolysin-adenylate cyclase [B. |
| | | pertussis Tohama I] |
| 260 | TAARIAKAPRLKLAI | NP_880248.1 formate dehydrogenase [B. pertussis Tohama I] |
| 261 | MRLGLLSVMSWLVTL | NP_880589.1 membrane protein [B. pertussis Tohama I] |
| 262 | DDLIDQIRQRGIAAL | NP_880783.1 hypothetical protein BP2128 [B. pertussis Tohama I] |
| 263 | DSDVILTVSGANTYI | NP_881891.1 hypothetical protein BP3358 [B. pertussis Tohama I] |
| 264 | LRVFESVLVAARAHG | NP_881872.1 ABC transporter ATP-binding protein [B. pertussis |
| | | Tohama I] |
| 265 | FRLIWLYLRMRWLSR | NP_882288.1 type IV secretion system protein PtlB [B. pertussis |
| | | Tohama I] |
| 266 | RGRKRFVQGLRNRRL | NP_881889.1 phage lysozyme [B. pertussis Tohama I] |
| 267 | PVTLAFALTTRVRDL | NP_880587.1 methyltransferase [B. pertussis Tohama I] |
| 268 | ELLQVQONLYAARTI | NP_879348.1 membrane protein insertase YidC [B. pertussis |
| | | Tohama I] |
| 269 | VQAAINAARSLLPTS | NP_882311.1 AcrB/AcrD/AcrF family protein [B. pertussis |
| | | Tohama I] |
| 270 | LGGLFLLFKGTMELH | NP_880589.1 membrane protein [B. pertussis Tohama I] |
| 271 | PLIRHKLGIMRRADL | NP_879837.1 uracil phosphoribosyltransferase [B. pertussis |
| | | Tohama I] |
| 272 | FDVIAQAISGMMSIT | NP_881186.1 hypothetical protein BP2559 [B. pertussis Tohama I] |
| 273 | INIPWSFHAGYRYSF | NP_882013.1 BrkA autotransporter [B. pertussis Tohama I] |
| 274 | VSDMGPLLLSRMLEL | NP_880945.1 ATP-binding protein [B. pertussis Tohama I] |
| 275 | PAGFYYKTFMWPAKF | NP_881143.1 sarcosine oxidase subunit alpha [B. pertussis |
| | | Tohama I] |
| 276 | EDGFLRSFGTGRHFP | NP_880359.1 capsular polysaccharide export protein [B. |
| | | pertussis Tohama I] |
| 277 | LSWIVYLRRQIRQRK | NP_880569.1 virulence sensor protein BvgS [B. pertussis |
| | | Tohama I] |
| 278 | RGRGIALLPSMASEA | NP_879350.1 LysR family transcriptional regulator [B. pertussis |
| | | Tohama I] |
| 279 | TANRRLAALRRFYAW | NP_880275.1 tyrosine recombinase XerD [B. pertussis Tohama I] |
| 280 | ARSIHTVKRLVFVLL | NP_880697.1 integral membrane protein [B. pertussis Tohama I] |
| 281 | TAVMLLLTFVPELVL | NP_880560.1 membrane protein [B. pertussis Tohama I] |
| 282 | TTVVNQVAKARAQEI | NP_881188.1 recombination-associated protein [B. pertussis |
| | | Tohama I] |
| 283 | DKVMKHLARLWGFR | NP_881742.1 SpoVR family protein [B. pertussis Tohama I] |
| | V | |
| 284 | APWIWLRYIGATRLG | NP_880872.1 alanine racemase [B. pertussis Tohama I] |
| 285 | PETHAILRRIRRVID | NP_880087.1 malto-oligosyltrehalose trehalohydrolase [B. |
| | | pertussis Tohama I] |
| 286 | GRVDSIIMRIADVQL | NP_882303.1 transport system permease [B. pertussis Tohama I] |
| 287 | DAMRQLQSAPAGPVV | NP_879350.1 LysR family transcriptional regulator [B. pertussis |
| | | Tohama I] |
| 288 | PMINLLFTPVVKRFR | NP_880700.1 LysR family transcriptional regulator [B. pertussis |
| | | Tohama I] |
| 289 | GKLLDAMLQSVGMSR | NP_882069.1 bacteriophage-related DNA polymerase [B. |
| | | pertussis Tohama I] |
| 290 | VYASFWVIVTQIVVL | NP_880589.1 membrane protein [B. pertussis Tohama I] |
| 291 | EEMLRFGVMPKIALL | NP_879899.1 NADP-dependent malic enzyme [B. pertussis |
| | | Tohama I] |
| 292 | FHRLNVIRLRLPPLR | NP_880331.1 nitrogen regulation protein NR(I) [B. pertussis |
| | | Tohama I] |
| 293 | FFLCAILYVRPAKRA | NP_879871.1 membrane protein [B. pertussis Tohama I] |
| 294 | LPVLDVMQTMPSFVY | NP_880722.1 binding-protein-dependent transport protein [B. |
| | | pertussis Tohama I] |
| 295 | MKILNAIRRGLALAG | NP_880217.1 exported protein [B. pertussis Tohama I] |
| 296 | LILRFLVGVALAGIY | NP_881741.1 membrane protein [B. pertussis Tohama I] |
| 297 | KGKFQMFQIGRIGGY | NP_880698.1 exported protein [B. pertussis Tohama I] |
| 298 | AGAWLVVAATDDRA | NP_879840.1 siroheme synthase [B. pertussis Tohama I] |
| | V | |
| 299 | KRIMFRRAMKRAMQ | NP_882129.1 30S ribosomal protein S3 [B. pertussis Tohama I] |
| | N | |
| 300 | PSVYSIMGAIALVSW | NP_880933.1 integral membrane transport protein [B. pertussis |
| | | Tohama I] |
| 301 | IALLCYADGERRYII | NP_882126.1 50S ribosomal protein L2 [B. pertussis Tohama I] |
| 302 | LFKQMLMVSGFDRYY | NP_879539.1 aspartate--tRNA ligase [B. pertussis Tohama I] |

[0047] TABLE 3. PT(O) ANT 1—Overlappinhg peptides covering the entire sequence of NP_879836.1 D-alanyl-D-alanine carboxypeptidase [B. pertussis Tohama I].

TABLE 3
PT(O) ANT 1-Overlapping peptides covering the entire sequence of NP_879836.1
D-alanyl-D-alanine carboxypeptidase [B. pertussis Tohama I]

| SEQ ID | | | |
|---|---|---|---|
| NO: | Peptide | Start | End |
| 303 | MRRAGKQGKWQQWLA | 1 | 15 |
| 304 | KQGKWQQWLAGVMLA | 6 | 20 |
| 305 | QQWLAGVMLALGAAG | 11 | 25 |
| 306 | GVMLALGAAGAAAQG | 16 | 30 |
| 307 | LGAAGAAAQGLPSSL | 21 | 35 |
| 308 | AAAQGLPSSLVAAWK | 26 | 40 |
| 309 | LPSSLVAAWKATKLP | 31 | 45 |
| 310 | VAAWKATKLPDQSLS | 36 | 50 |
| 311 | ATKLPDQSLSLVVQE | 41 | 55 |
| 312 | DQSLSLVVQEINGPR | 46 | 60 |
| 313 | LVVQEINGPRLATLN | 51 | 65 |
| 314 | INGPRLATLNAKEPR | 56 | 70 |
| 315 | LATLNAKEPRNPASV | 61 | 75 |
| 316 | AKEPRNPASVMKLVT | 66 | 80 |
| 317 | NPASVMKLVTTWAAL | 71 | 85 |
| 318 | MKLVTTWAALSELGP | 76 | 90 |
| 319 | TWAALSELGPSYAWR | 81 | 95 |
| 320 | SELGPSYAWRTEFLT | 86 | 100 |
| 321 | SYAWRTEFLTEPGNR | 91 | 105 |
| 322 | TEFLTEPGNRPDAHG | 96 | 110 |
| 323 | EPGNRPDAHGVLRGP | 101 | 115 |
| 324 | PDAHGVLRGPLYLRA | 106 | 120 |
| 325 | VLRGPLYLRAGGDPQ | 111 | 125 |
| 326 | LYLRAGGDPQLLLQD | 116 | 130 |
| 327 | GGDPQLLLQDLWALL | 121 | 135 |
| 328 | LLLQDLWALLRELRL | 126 | 140 |
| 329 | LWALLRELRLRGVKQ | 131 | 145 |
| 330 | RELRLRGVKQIGDLV | 136 | 150 |
| 331 | RGVKQIGDLVVDRSI | 141 | 155 |
| 332 | IGDLVVDRSIFGQVA | 146 | 160 |
| 333 | VDRSIFGQVAIDPGA | 151 | 165 |
| 334 | FGQVAIDPGAFDGAS | 156 | 170 |
| 335 | IDPGAFDGASDRAYN | 161 | 175 |
| 336 | FDGASDRAYNASPDA | 166 | 180 |
| 337 | DRAYNASPDALMVGF | 171 | 185 |
| 338 | ASPDALMVGFGAQRL | 176 | 190 |
| 339 | LMVGFGAQRLLFTPD | 181 | 195 |
| 340 | GAQRLLFTPDAAARK | 186 | 200 |
| 341 | LFTPDAAARKWVPMI | 191 | 205 |
| 342 | AAARKWVPMIDPPLP | 196 | 210 |
| 343 | WVPMIDPPLPGLRLE | 201 | 215 |
| 344 | DPPLPGLRLEGAVEW | 206 | 220 |
| 345 | GLRLEGAVEWSDVRC | 211 | 225 |
| 346 | GAVEWSDVRCPGPPV | 216 | 230 |
| 347 | SDVRCPGPPVVGTEP | 221 | 235 |
| 348 | PGPPVVGTEPVVTQQ | 226 | 240 |
| 349 | VGTEPVVTQQGVSIR | 231 | 245 |
| 350 | VVTQQGVSIRLSGKV | 236 | 250 |
| 351 | GVSIRLSGKVAGSCG | 241 | 255 |
| 352 | LSGKVAGSCGEFSLY | 246 | 260 |
| 353 | AGSCGEFSLYRLALS | 251 | 265 |
| 354 | EFSLYRLALSQPEYA | 256 | 270 |
| 355 | RLALSQPEYASAVFR | 261 | 275 |
| 356 | QPEYASAVFRLLWRE | 266 | 280 |
| 357 | SAVFRLLWRELGGTL | 271 | 285 |
| 358 | LLWRELGGTLKGQIR | 276 | 290 |
| 359 | LGGTLKGQIRSGVVP | 281 | 295 |
| 360 | KGQIRSGVVPPDAVV | 286 | 300 |
| 361 | SGVVPPDAVVLASHD | 291 | 305 |
| 362 | PDAVVLASHDSPTLG | 296 | 310 |
| 363 | LASHDSPTLGEAIRT | 301 | 315 |
| 364 | SPTLGEAIRTINKRS | 306 | 320 |
| 365 | EAIRTINKRSNNVMA | 311 | 325 |
| 366 | INKRSNNVMARTLLL | 316 | 330 |
| 367 | NNVMARTLLLTLGAE | 321 | 335 |
| 368 | RTLLLTLGAERGRRP | 326 | 340 |
| 369 | TLGAERGRRPATVES | 331 | 345 |
| 370 | RGRRPATVESSGVVA | 336 | 350 |
| 371 | ATVESSGVVARTVLG | 341 | 355 |
| 372 | SGVVARTVLGAQGLE | 346 | 360 |
| 373 | RTVLGAQGLEMPELV | 351 | 365 |
| 374 | AQGLEMPELVIDNGS | 356 | 370 |
| 375 | MPELVIDNGSGLSRE | 361 | 375 |
| 376 | IDNGSGLSREGRVSA | 366 | 380 |
| 377 | GLSREGRVSADSLAS | 371 | 385 |
| 378 | GRVSADSLASMLTVA | 376 | 390 |
| 379 | DSLASMLTVAWNSPL | 381 | 395 |
| 380 | MLTVAWNSPLMPEFI | 386 | 400 |
| 381 | WNSPLMPEFISSLAI | 391 | 405 |
| 382 | MPEFISSLAIAGVDG | 396 | 410 |
| 383 | SSLAIAGVDGTVRRR | 401 | 415 |
| 384 | AGVDGTVRRRLKGNG | 406 | 420 |
| 385 | TVRRRLKGNGAQGMA | 411 | 425 |
| 386 | LKGNGAQGMAHLKTG | 416 | 430 |
| 387 | AQGMAHLKTGSLRDV | 421 | 435 |
| 388 | HLKTGSLRDVRAVAG | 426 | 440 |
| 389 | SLRDVRAVAGYVLGA | 431 | 445 |
| 390 | RAVAGYVLGASGKRY | 436 | 450 |
| 391 | YVLGASGKRYVVVSM | 441 | 455 |
| 392 | SGKRYVVVSMVNHEN | 446 | 460 |
| 393 | VVVSMVNHENAAAVR | 451 | 465 |
| 394 | VNHENAAAVRSFDDA | 456 | 470 |
| 395 | AAAVRSFDDALVAWL | 461 | 475 |
| 396 | VRSFDDALVAWLAEQ | 464 | 478 |
| | Full Sequence | | |

| | |
|---|---|
| 2599 | MRRAGKQGKWQQWLAGVMLALGAAGAAAQGLPSSLVAAWKATKLPDQSLSLV |
| | VQEINGPRLATLNAKEPRNPASVMKLVTTWAALSELGPSYAWRTEFLTEPGNRPD |
| | AHGVLRGPLYLRAGGDPQLLLQDLWALLRELRLRGVKQIGDLVVDRSIFGQVAID |
| | PGAFDGASDRAYNASPDALMVGFGAQRLLFTPDAAARKWVPMIDPPLPGLRLEGA |
| | VEWSDVRCPGPPVVGTEPVVTQQGVSIRLSGKVAGSCGEFSLYRLALSQPEYASAV |
| | FRLLWRELGGTLKGQIRSGVVPPDAVVLASHDSPTLGEAIRTINKRSNNVMARTLL |
| | LTLGAERGRRPATVESSGVVARTVLGAQGLEMPELVIDNGSGLSREGRVSADSLAS |
| | MLTVAWNSPLMPEFISSLAIAGVDGTVRRRLKGNGAQGMAHLKTGSLRDVRAVA |
| | GYVLGASGKRYVVVSMVNHENAAAVRSFDDALVAWLAEQ |

[0048] TABLE 4. PT(O) ANT 2—Overlapping peptides covering the entire sequence of NP_879348.1 membrane protein insertase YidC [B. pertussis Tohama I].

TABLE 4
PT(O) ANT 2-Overlapping peptides covering
the entire sequence of NP_879348.1
membrane protein insertase
YidC [B. pertussis Tohama I]

| SEQ | | | |
|---|---|---|---|
| ID | | | |
| NO: | Peptide | Start | End |
| 397 | MDIRRTVLWMIFSFS | 1 | 15 |
| 398 | TVLWMIFSFSLLLLW | 6 | 20 |
| 399 | IFSFSLLLLWNNWQI | 11 | 25 |
| 400 | LLLLWNNWQIHNGKP | 16 | 30 |
| 401 | NNWQIHNGKPSLFGG | 21 | 35 |
| 402 | HNGKPSLFGGPAPEA | 26 | 40 |
| 403 | SLFGGPAPEAAATQQ | 31 | 45 |
| 404 | PAPEAAATQQPKADA | 36 | 50 |
| 405 | AATQQPKADANGTAA | 41 | 55 |
| 406 | PKADANGTAASSTAS | 46 | 60 |
| 407 | NGTAASSTASIPSSP | 51 | 65 |
| 408 | SSTASIPSSPAAAPA | 56 | 70 |
| 409 | IPSSPAAAPAAASVP | 61 | 75 |
| 410 | AAAPAAASVPGAAAP | 66 | 80 |
| 411 | AASVPGAAAPAAAKS | 71 | 85 |
| 412 | GAAAPAAAKSEQVVI | 76 | 90 |
| 413 | AAAKSEQVVITTDVL | 81 | 95 |
| 414 | EQVVITTDVLRLTFD | 86 | 100 |
| 415 | TTDVLRLTFDSNGAQ | 91 | 105 |
| 416 | RLTFDSNGAQLIRAE | 96 | 110 |
| 417 | SNGAQLIRAELLKYP | 101 | 115 |
| 418 | LIRAELLKYPSSSQS | 106 | 120 |
| 419 | LLKYPSSSQSDKPTV | 111 | 125 |
| 420 | SSSQSDKPTVLMDRS | 116 | 130 |
| 421 | DKPTVLMDRSADLVY | 121 | 135 |
| 422 | LMDRSADLVYVAQTG | 126 | 140 |
| 423 | ADLVYVAQTGVVGAP | 131 | 145 |
| 424 | VAQTGVVGAPQGESF | 136 | 150 |
| 425 | VVGAPQGESFPTHQT | 141 | 155 |
| 426 | QGESFPTHQTPFHLV | 146 | 160 |
| 427 | PTHQTPFHLVSSERS | 151 | 165 |
| 428 | PFHLVSSERSLTGDT | 156 | 170 |
| 429 | SSERSLTGDTLDVVF | 161 | 175 |
| 430 | LTGDTLDVVFEAESG | 166 | 180 |
| 431 | LDVVFEAESGGLKVT | 171 | 185 |
| 432 | EAESGGLKVTKTYTL | 176 | 190 |
| 433 | GLKVTKTYTLHRGRY | 181 | 195 |
| 434 | KTYTLHRGRYDVDVR | 186 | 200 |
| 435 | HRGRYDVDVRHAMAN | 191 | 205 |
| 436 | DVDVRHAMANTGGAP | 196 | 210 |
| 437 | HAMANTGGAPLNPAL | 201 | 215 |
| 438 | TGGAPLNPALYLQLE | 206 | 220 |
| 439 | LNPALYLQLERDGTD | 211 | 225 |
| 440 | YLQLERDGTDPAGTS | 216 | 230 |
| 441 | RDGTDPAGTSSFYHT | 221 | 235 |
| 442 | PAGTSSFYHTFTGVA | 226 | 240 |
| 443 | SFYHTFTGVAVYSEQ | 231 | 245 |
| 444 | FTGVAVYSEQDKFQK | 236 | 250 |
| 445 | VYSEQDKFQKVTFSD | 241 | 255 |
| 446 | DKFQKVTFSDIEKKK | 246 | 260 |
| 447 | VTFSDIEKKKGTYIK | 251 | 265 |
| 448 | IEKKKGTYIKQADNG | 256 | 270 |
| 449 | GTYIKQADNGWIGIV | 261 | 275 |
| 450 | QADNGWIGIVQHYFA | 266 | 280 |
| 451 | WIGIVQHYFATAWIP | 271 | 285 |
| 452 | QHYFATAWIPAQGKQ | 276 | 290 |
| 453 | TAWIPAQGKQRTNEL | 281 | 295 |
| 454 | AQGKQRTNELLQVQQ | 286 | 300 |
| 455 | RTNELLQVQONLYAA | 291 | 305 |
| 456 | LQVQONLYAARTIEA | 296 | 310 |
| 457 | NLYAARTIEAVGTIA | 301 | 315 |
| 458 | RTIEAVGTIAPGSSA | 306 | 320 |
| 459 | VGTIAPGSSANVDAH | 311 | 325 |
| 460 | PGSSANVDAHLWVGP | 316 | 330 |
| 461 | NVDAHLWVGPQDQKA | 321 | 335 |
| 462 | LWVGPQDQKAMAAVA | 326 | 340 |
| 463 | QDQKAMAAVAPGLEL | 331 | 345 |
| 464 | MAAVAPGLELVVDYG | 336 | 350 |
| 465 | PGLELVVDYGWLTII | 341 | 355 |
| 466 | VVDYGWLTIIAKPLF | 346 | 360 |
| 467 | WLTIIAKPLFTLMTW | 351 | 365 |
| 468 | AKPLFTLMTWLHGLL | 356 | 370 |
| 469 | TLMTWLHGLLGNWGW | 361 | 375 |
| 470 | LHGLLGNWGWTIVAL | 366 | 380 |
| 471 | GNWGWTIVALTVIIK | 371 | 385 |
| 472 | TIVALTVIIKAVFFP | 376 | 390 |
| 473 | TVIIKAVFFPLAAAS | 381 | 395 |
| 474 | AVFFPLAAASYRSMA | 386 | 400 |
| 475 | LAAASYRSMARMKQV | 391 | 405 |
| 476 | YRSMARMKQVAPRLQ | 396 | 410 |
| 477 | RMKQVAPRLQALKEK | 401 | 415 |
| 478 | APRLQALKEKYGDDR | 406 | 420 |
| 479 | ALKEKYGDDRQKLNQ | 411 | 425 |
| 480 | YGDDRQKLNQAMMEM | 416 | 430 |
| 481 | QKLNQAMMEMYRTEK | 421 | 435 |
| 482 | AMMEMYRTEKINPLG | 426 | 440 |
| 483 | YRTEKINPLGGCLPM | 431 | 445 |
| 484 | INPLGGCLPMVVQIP | 436 | 450 |
| 485 | GCLPMVVQIPVFIAL | 441 | 455 |
| 486 | VVQIPVFIALYWVLL | 446 | 460 |
| 487 | VFIALYWVLLASVEM | 451 | 465 |
| 488 | YWVLLASVEMRGAPW | 456 | 470 |
| 489 | ASVEMRGAPWILWVH | 461 | 475 |
| 490 | RGAPWILWVHDLSVR | 466 | 480 |
| 491 | ILWVHDLSVRDPFFI | 471 | 485 |
| 492 | DLSVRDPFFILPAIM | 476 | 490 |
| 493 | DPFFILPAIMMATMF | 481 | 495 |
| 494 | LPAIMMATMFLQIKL | 486 | 500 |
| 495 | MATMFLQIKLNPTPP | 491 | 505 |
| 496 | LQIKLNPTPPDPVQA | 496 | 510 |
| 497 | NPTPPDPVQAKVMMI | 501 | 515 |
| 498 | DPVQAKVMMIMPLVF | 506 | 520 |
| 499 | KVMMIMPLVFGGMMF | 511 | 525 |
| 500 | MPLVFGGMMFFFPAG | 516 | 530 |
| 501 | GGMMFFFPAGLVLYW | 521 | 535 |
| 502 | FFPAGLVLYWCVNNT | 526 | 540 |
| 503 | LVLYWCVNNTLSIAQ | 531 | 545 |
| 504 | CVNNTLSIAQQWTIT | 536 | 550 |
| 505 | LSIAQQWTITRNLER | 541 | 555 |
| 506 | QWTITRNLERQAAAA | 546 | 560 |
| 507 | ITRNLERQAAAAANR | 549 | 563 |

| | |
|---|---|
| | Full Sequence |
| 2600 | MDIRRTVLWMIFSFSLLLLWNNWQIHNGKPSLFGGPAPEA |
| | AATQQPKADANGTAASSTASIPSSPAAAPAAASVPGAAAP |
| | AAAKSEQVVITTDVLRLTFDSNGAQLIRAELLKYPSSSQS |
| | DKPTVLMDRSADLVYVAQTGVVGAPQGESFPTHQTPFHLV |
| | SSERSLTGDTLDVVFEAESGGLKVTKTYTLHRGRYDVDVR |
| | HAMANTGGAPLNPALYLQLERDGTDPAGTSSFYHTFTGVA |
| | VYSEQDKFQKVTFSDIEKKKGTYIKQADNGWIGIVQHYFA |
| | TAWIPAQGKQRTNELLQVQONLYAARTIEAVGTIAPGSSA |
| | NVDAHLWVGPQDQKAMAAVAPGLELVVDYGWLTIIAKPLF |
| | TLMTWLHGLLGNWGWTIVALTVIIKAVFFPLAAASYRSMA |
| | RMKQVAPRLQALKEKYGDDRQKLNQAMMEMYRTEKINPLG |
| | GCLPMVVQIPVFIALYWVLLASVEMRGAPWILWVHDLSVR |
| | DPFFILPAIMMATMFLQIKLNPTPPDPVQAKVMMIMPLVF |
| | GGMMFFFPAGLVLYWCVNNTLSIAQQWTITRNLERQAAAA |
| | ANR |

[0049] TABLE 5. PT(O) ANT 3—Overlapping peptides covering the entire sequence of NP_880087.1 malto-oligosyltrehalose trehalohydrolase [B. pertussis Tohama I].

TABLE 5
PT(O) ANT 3-Overlapping peptides covering
the entire sequence of NP_880087.1 malto-
trehalohydrolase [B. pertussis Tohama I]

| SEQ | | | |
|---|---|---|---|
| ID | | | |
| NO: | Peptide | Start | End |
| 508 | MPATHPAPDPLWYKD | 1 | 15 |
| 509 | PAPDPLWYKDAVIYQ | 6 | 20 |
| 510 | LWYKDAVIYQLHVKS | 11 | 25 |
| 511 | AVIYQLHVKSFFDAN | 16 | 30 |
| 512 | LHVKSFFDANDDGVG | 21 | 35 |
| 513 | FFDANDDGVGDFAGL | 26 | 40 |
| 514 | DDGVGDFAGLLAKLD | 31 | 45 |
| 515 | DFAGLLAKLDYIVEL | 36 | 50 |
| 516 | LAKLDYIVELGVNTI | 41 | 55 |
| 517 | YIVELGVNTIWLLPF | 46 | 60 |
| 518 | GVNTIWLLPFYPSPR | 51 | 65 |
| 519 | WLLPFYPSPRRDDGY | 56 | 70 |
| 520 | YPSPRRDDGYDIADY | 61 | 75 |
| 521 | RDDGYDIADYRGVHP | 66 | 80 |
| 522 | DIADYRGVHPDYGSL | 71 | 85 |
| 523 | RGVHPDYGSLADARL | 76 | 90 |
| 524 | DYGSLADARLLVRAA | 81 | 95 |
| 525 | ADARLLVRAAHARGL | 86 | 100 |
| 526 | LVRAAHARGLRVITE | 91 | 105 |
| 527 | HARGLRVITELVINH | 96 | 110 |
| 528 | RVITELVINHTSDQH | 101 | 115 |
| 529 | LVINHTSDQHPWFQR | 106 | 120 |
| 530 | TSDQHPWFQRARAAR | 111 | 125 |
| 531 | PWFQRARAARPGSAH | 116 | 130 |
| 532 | ARAARPGSAHRAYYV | 121 | 135 |
| 533 | PGSAHRAYYVWSDDD | 126 | 140 |
| 534 | RAYYVWSDDDKAYAG | 131 | 145 |
| 535 | WSDDDKAYAGTRIIF | 136 | 150 |
| 536 | KAYAGTRIIFCDTEK | 141 | 155 |
| 537 | TRIIFCDTEKSNWTW | 146 | 160 |
| 538 | CDTEKSNWTWDPVAG | 151 | 165 |
| 539 | SNWTWDPVAGAYFWH | 156 | 170 |
| 540 | DPVAGAYFWHRFYSH | 161 | 175 |
| 541 | AYFWHRFYSHQPDLN | 166 | 180 |
| 542 | RFYSHQPDLNYDNPQ | 171 | 185 |
| 543 | QPDLNYDNPQVLREV | 176 | 190 |
| 544 | YDNPQVLREVLGAMR | 181 | 195 |
| 545 | VLREVLGAMRYWLDM | 186 | 200 |
| 546 | LGAMRYWLDMGVDGL | 191 | 205 |
| 547 | YWLDMGVDGLRLDAV | 196 | 210 |
| 548 | GVDGLRLDAVPYLVE | 201 | 215 |
| 549 | RLDAVPYLVEREGTN | 206 | 220 |
| 550 | PYLVEREGTNNENLP | 211 | 225 |
| 551 | REGTNNENLPETHAI | 216 | 230 |
| 552 | NENLPETHAILRRIR | 221 | 235 |
| 553 | ETHAILRRIRRVIDS | 226 | 240 |
| 554 | LRRIRRVIDSEYPGR | 231 | 245 |
| 555 | RVIDSEYPGRMLLAE | 236 | 250 |
| 556 | EYPGRMLLAEANQWP | 241 | 255 |
| 557 | MLLAEANQWPEDAQE | 246 | 260 |
| 558 | ANQWPEDAQEYFGAG | 251 | 265 |
| 559 | EDAQEYFGAGDECHM | 256 | 270 |
| 560 | YFGAGDECHMAFHFP | 261 | 275 |
| 561 | DECHMAFHFPLMPRM | 266 | 280 |
| 562 | AFHFPLMPRMYMAIA | 271 | 285 |
| 563 | LMPRMYMAIAQEDRL | 276 | 290 |
| 564 | YMAIAQEDRLPVTDI | 281 | 295 |
| 565 | QEDRLPVTDIIRQTP | 286 | 300 |
| 566 | PVTDIIRQTPSIAPQ | 291 | 305 |
| 567 | IRQTPSIAPQCQWAI | 296 | 310 |
| 568 | SIAPQCQWAIFLRNH | 301 | 315 |
| 569 | CQWAIFLRNHDELTL | 306 | 320 |
| 570 | FLRNHDELTLEMVTS | 311 | 325 |
| 571 | DELTLEMVTSRERDY | 316 | 330 |
| 572 | EMVTSRERDYLWNVY | 321 | 335 |
| 573 | RERDYLWNVYAAEPR | 326 | 340 |
| 574 | LWNVYAAEPRARINL | 331 | 345 |
| 575 | AAEPRARINLGIRRR | 336 | 350 |
| 576 | ARINLGIRRRLAPLL | 341 | 355 |
| 577 | GIRRRLAPLLERDRR | 346 | 360 |
| 578 | LAPLLERDRRRIELM | 351 | 365 |
| 579 | ERDRRRIELMNSLLL | 356 | 370 |
| 580 | RIELMNSLLLSMPGT | 361 | 375 |
| 581 | NSLLLSMPGTPVLYY | 366 | 380 |
| 582 | SMPGTPVLYYGDELG | 371 | 385 |
| 583 | PVLYYGDELGMGDNI | 376 | 390 |
| 584 | GDELGMGDNIHLGDR | 381 | 395 |
| 585 | MGDNIHLGDRDGVRT | 386 | 400 |
| 586 | HLGDRDGVRTPMQWS | 391 | 405 |
| 587 | DGVRTPMQWSPDRNG | 396 | 410 |
| 588 | PMQWSPDRNGGFSRA | 401 | 415 |
| 589 | PDRNGGFSRADPERL | 406 | 420 |
| 590 | GFSRADPERLPLPLL | 411 | 425 |
| 591 | DPERLPLPLLMGPLY | 416 | 430 |
| 592 | PLPLLMGPLYGYEAV | 421 | 435 |
| 593 | MGPLYGYEAVNVEAQ | 426 | 440 |
| 594 | GYEAVNVEAQQRDPH | 431 | 445 |
| 595 | NVEAQQRDPHSLLNW | 436 | 450 |
| 596 | QRDPHSLLNWTRRML | 441 | 455 |
| 597 | SLLNWTRRMLAKRRQ | 446 | 460 |
| 598 | TRRMLAKRRQSHVFG | 451 | 465 |
| 599 | AKRRQSHVFGRGELS | 456 | 470 |
| 600 | SHVFGRGELSFLYPG | 461 | 475 |
| 601 | RGELSFLYPGNRKIL | 466 | 480 |
| 602 | FLYPGNRKILAYLRT | 471 | 485 |
| 603 | NRKILAYLRTWEDTV | 476 | 490 |
| 604 | AYLRTWEDTVVLCVA | 481 | 495 |
| 605 | WEDTVVLCVANLSQA | 486 | 500 |
| 606 | VLCVANLSQAAQPVE | 491 | 505 |
| 607 | NLSQAAQPVELHLSE | 496 | 510 |
| 608 | AQPVELHLSEYAGRV | 501 | 515 |
| 609 | LHLSEYAGRVPVEML | 506 | 520 |
| 610 | YAGRVPVEMLGGTAF | 511 | 525 |
| 611 | PVEMLGGTAFPQIGE | 516 | 530 |
| 612 | GGTAFPQIGELPYLL | 521 | 535 |
| 613 | PQIGELPYLLTLPPF | 526 | 540 |
| 614 | LPYLLTLPPFGFYWL | 531 | 545 |
| 615 | TLPPFGFYWLDLSAG | 536 | 550 |
| 616 | GFYWLDLSAGAAPPA | 541 | 555 |
| 617 | DLSAGAAPPAWHSEL | 546 | 560 |
| 618 | AAPPAWHSELPPQMP | 551 | 565 |
| 619 | WHSELPPQMPESITL | 556 | 570 |
| 620 | PPQMPESITLVSRGA | 561 | 575 |
| 621 | ESITLVSRGAGAALR | 566 | 580 |
| 622 | VSRGAGAALRLTEAS | 571 | 585 |
| 623 | GAALRLTEASRRQLE | 576 | 590 |
| 624 | LTEASRRQLEADVLP | 581 | 595 |
| 625 | RRQLEADVLPAYLQR | 586 | 600 |
| 626 | ADVLPAYLQRQRWYA | 591 | 605 |
| 627 | AYLQRQRWYAARRKP | 596 | 610 |
| 628 | QRWYAARRKPGVMRL | 601 | 615 |
| 629 | ARRKPGVMRLAYSVP | 606 | 620 |
| 630 | GVMRLAYSVPLNDDV | 611 | 625 |
| 631 | AYSVPLNDDVESYYE | 616 | 630 |
| 632 | LNDDVESYYEAEIEV | 621 | 635 |
| 633 | ESYYEAEIEVSDDGP | 626 | 640 |
| 634 | AEIEVSDDGPPRRFH | 631 | 645 |
| 635 | SDDGPPRRFHTPVAL | 636 | 650 |
| 636 | PRRFHTPVALAWQDD | 641 | 655 |
| 637 | TPVALAWQDDTAAQY | 646 | 660 |
| 638 | AWQDDTAAQYPLARV | 651 | 665 |
| 639 | TAAQYPLARVRRGAQ | 656 | 670 |
| 640 | PLARVRRGAQLGTLT | 661 | 675 |
| 641 | RRGAQLGTLTDASLQ | 666 | 680 |
| 642 | LGTLTDASLQPGYAR | 671 | 685 |
| 643 | DASLQPGYARVLLAA | 676 | 690 |
| 644 | PGYARVLLAALTAGR | 681 | 695 |
| 645 | VLLAALTAGRDIQAG | 686 | 700 |
| 646 | LTAGRDIQAGGEPAV | 691 | 705 |
| 647 | DIQAGGEPAVRLRFL | 696 | 710 |
| 648 | GEPAVRLRFLPEPGL | 701 | 715 |
| 649 | RLRFLPEPGLADLAL | 706 | 720 |
| 650 | PEPGLADLALRDDSE | 711 | 725 |
| 651 | ADLALRDDSEVRALS | 716 | 730 |
| 652 | RDDSEVRALSADQSN | 721 | 735 |
| 653 | VRALSADQSNSSLLV | 726 | 740 |
| 654 | ADQSNSSLLVGERVV | 731 | 745 |
| 655 | SSLLVGERVVFKLLR | 736 | 750 |
| 656 | GERVVFKLLRELHAG | 741 | 755 |
| 657 | FKLLRELHAGPHPEA | 746 | 760 |
| 658 | ELHAGPHPEAEMTRY | 751 | 765 |
| 659 | PHPEAEMTRYLTQAG | 756 | 770 |
| 660 | EMTRYLTQAGYAHTP | 761 | 775 |
| 661 | LTQAGYAHTPALLGE | 766 | 780 |
| 662 | YAHTPALLGEVVRVQ | 771 | 785 |
| 663 | ALLGEVVRVQGDQAP | 776 | 790 |
| 664 | VVRVQGDQAPHTLAL | 781 | 795 |
| 665 | GDQAPHTLALAHAYV | 786 | 800 |
| 666 | HTLALAHAYVVNEGD | 791 | 805 |
| 667 | AHAYVVNEGDAWNWT | 796 | 810 |
| 668 | VNEGDAWNWTVAYLK | 801 | 815 |
| 669 | AWNWTVAYLKRTLDA | 806 | 820 |
| 670 | VAYLKRTLDAAILTG | 811 | 825 |
| 671 | RTLDAAILTGASADD | 816 | 830 |
| 672 | AILTGASADDYQQEL | 821 | 835 |
| 673 | ASADDYQQELAGYEV | 826 | 840 |
| 674 | YQQELAGYEVLAGTI | 831 | 845 |
| 675 | AGYEVLAGTIGQRLA | 836 | 850 |
| 676 | LAGTIGQRLAQMHSV | 841 | 855 |
| 677 | GQRLAQMHSVLARAG | 846 | 860 |
| 678 | QMHSVLARAGELPGF | 851 | 865 |
| 679 | LARAGELPGFAPRPA | 856 | 870 |
| 680 | ELPGFAPRPASERDA | 861 | 875 |
| 681 | APRPASERDAALAGE | 866 | 880 |
| 682 | SERDAALAGERAVAQ | 871 | 885 |
| 683 | ALAGERAVAQLDRAL | 876 | 890 |
| 684 | RAVAQLDRALQALRA | 881 | 895 |
| 685 | LDRALQALRACESGL | 886 | 900 |
| 686 | QALRACESGLAPASH | 891 | 905 |
| 687 | CESGLAPASHACAQW | 896 | 910 |
| 688 | APASHACAQWLFEHR | 901 | 915 |
| 689 | ACAQWLFEHRDRLAA | 906 | 920 |
| 690 | LFEHRDRLAAHIMTL | 911 | 925 |
| 691 | DRLAAHIMTLAQAET | 916 | 930 |
| 692 | HIMTLAQAETGALRI | 921 | 935 |
| 693 | AQAETGALRIRVHGD | 926 | 940 |
| 694 | GALRIRVHGDFHLGQ | 931 | 945 |
| 695 | RVHGDFHLGQILVAQ | 936 | 950 |
| 696 | FHLGQILVAQTDAYL | 941 | 955 |
| 697 | ILVAQTDAYLIDFEG | 946 | 960 |
| 698 | TDAYLIDFEGEPARP | 951 | 965 |
| 699 | IDFEGEPARPMAERR | 956 | 970 |
| 700 | EPARPMAERRQLSSP | 961 | 975 |
| 701 | MAERRQLSSPFKDVA | 966 | 980 |
| 702 | QLSSPFKDVAGILRS | 971 | 985 |
| 703 | FKDVAGILRSFDYAV | 976 | 990 |
| 704 | GILRSFDYAVAELSR | 981 | 995 |
| 705 | FDYAVAELSRDDPLG | 986 | 1000 |
| 706 | AELSRDDPLGGAPRD | 991 | 1005 |
| 707 | DDPLGGAPRDFNTGV | 996 | 1010 |
| 708 | GAPRDFNTGVAEPAD | 1001 | 1015 |
| 709 | FNTGVAEPADPASAP | 1006 | 1020 |
| 710 | AEPADPASAPRETRE | 1011 | 1025 |
| 711 | PASAPRETREALLAR | 1016 | 1030 |
| 712 | RETREALLARFRQRA | 1021 | 1035 |
| 713 | ALLARFRQRAGAALL | 1026 | 1040 |
| 714 | FRQRAGAALLASYGN | 1031 | 1045 |
| 715 | GAALLASYGNAIDPV | 1036 | 1050 |
| 716 | ASYGNAIDPVLALPP | 1041 | 1055 |
| 717 | AIDPVLALPPERAQA | 1046 | 1060 |
| 718 | LALPPERAQALTCLY | 1051 | 1065 |
| 719 | ERAQALTCLYLLEKA | 1056 | 1070 |
| 720 | LTCLYLLEKAAYEIC | 1061 | 1075 |
| 721 | LLEKAAYEICYESAY | 1066 | 1080 |
| 722 | AYEICYESAYRPERL | 1071 | 1085 |
| 723 | YESAYRPERLPVPIH | 1076 | 1090 |
| 724 | RPERLPVPIHGLAET | 1081 | 1095 |
| 725 | PVPIHGLAETARAAL | 1086 | 1100 |
| 726 | GLAETARAALLAAAV | 1091 | 1105 |
| 727 | ARAALLAAAVDHDEG | 1096 | 1110 |
| 728 | ALLAAAVDHDEGPAP | 1099 | 1113 |

| | |
|---|---|
| | Full Sequence |
| 2601 | MPATHPAPDPLWYKDAVIYQLHVKSFFDANDDGVGDFAGL |
| | LAKLDYIVELGVNTIWLLPFYPSPRRDDGYDIADYRGVHP |
| | DYGSLADARLLVRAAHARGLRVITELVINHTSDQHPWFQR |
| | ARAARPGSAHRAYYVWSDDDKAYAGTRIIFCDTEKSNWTW |
| | DPVAGAYFWHRFYSHQPDLNYDNPQVLREVLGAMRYWLDM |
| | GVDGLRLDAVPYLVEREGTNNENLPETHAILRRIRRVIDS |
| | EYPGRMLLAEANQWPEDAQEYFGAGDECHMAFHFPLMPRM |
| | YMAIAQEDRLPVTDIIRQTPSIAPQCQWAIFLRNHDELTL |
| | EMVTSRERDYLWNVYAAEPRARINLGIRRRLAPLLERDRR |
| | RIELMNSLLLSMPGTPVLYYGDELGMGDNIHLGDRDGVRT |
| | PMQWSPDRNGGFSRADPERLPLPLLMGPLYGYEAVNVEAQ |
| | QRDPHSLLNWTRRMLAKRRQSHVFGRGELSFLYPGNRKIL |
| | AYLRTWEDTVVLCVANLSQAAQPVELHLSEYAGRVPVEML |
| | GGTAFPQIGELPYLLTLPPFGFYWLDLSAGAAPPAWHSEL |
| | PPQMPESITLVSRGAGAALRLTEASRRQLEADVLPAYLQR |
| | QRWYAARRKPGVMRLAYSVPLNDDVESYYEAEIEVSDDGP |
| | PRRFHTPVALAWQDDTAAQYPLARVRRGAQLGTLTDASLQ |
| | PGYARVLLAALTAGRDIQAGGEPAVRLRFLPEPGLADLAL |
| | RDDSEVRALSADQSNSSLLVGERVVFKLLRELHAGPHPEA |
| | EMTRYLTQAGYAHTPALLGEVVRVQGDQAPHTLALAHAYV |
| | VNEGDAWNWTVAYLKRTLDAAILTGASADDYQQELAGYEV |
| | LAGTIGQRLAQMHSVLARAGELPGFAPRPASERDAALAGE |
| | RAVAQLDRALQALRACESGLAPASHACAQWLFEHRDRLAA |
| | HIMTLAQAETGALRIRVHGDFHLGQILVAQTDAYLIDFEG |
| | EPARPMAERRQLSSPFKDVAGILRSFDYAVAELSRDDPLG |
| | GAPRDFNTGVAEPADPASAPRETREALLARFRQRAGAALL |
| | ASYGNAIDPVLALPPERAQALTCLYLLEKAAYEICYESAY |
| | RPERLPVPIHGLAETARAALLAAAVDHDEGPAP |

[0050] TABLE 6 PT(O) ANT 4—Overlapping peptides covering the entire sequence of NP880569.1 virulence sensor protein BvgS [B. pertussis Tohama I].

TABLE 6
PT(O) ANT 4-Overlapping peptides covering
the entire sequence of NP_880569.1 virulence
sensor protein BvgS [B. pertussis Tohama I]

| SEQ ID | | | |
|---|---|---|---|
| NO: | Peptide | Start | End |
| 729 | MPAPHRLYPRSLICL | 1 | 15 |
| 730 | RLYPRSLICLAQALL | 6 | 20 |
| 731 | SLICLAQALLAWALL | 11 | 25 |
| 732 | AQALLAWALLAWAPA | 16 | 30 |
| 733 | AWALLAWAPAQASQE | 21 | 35 |
| 734 | AWAPAQASQELTLVG | 26 | 40 |
| 735 | QASQELTLVGKAAVP | 31 | 45 |
| 736 | LTLVGKAAVPDVEVA | 36 | 50 |
| 737 | KAAVPDVEVALDGDD | 41 | 55 |
| 738 | DVEVALDGDDWRWLA | 46 | 60 |
| 739 | LDGDDWRWLARKRVL | 51 | 65 |
| 740 | WRWLARKRVLTLGVY | 56 | 70 |
| 741 | RKRVLTLGVYAPDIP | 61 | 75 |
| 742 | TLGVYAPDIPPFDVT | 66 | 80 |
| 743 | APDIPPFDVTYGERY | 71 | 85 |
| 744 | PFDVTYGERYEGLTA | 76 | 90 |
| 745 | YGERYEGLTADYMAI | 81 | 95 |
| 746 | EGLTADYMAIIAHNL | 86 | 100 |
| 747 | DYMAIIAHNLGMQAK | 91 | 105 |
| 748 | JAHNLGMQAKVLRYP | 96 | 110 |
| 749 | GMQAKVLRYPTREQA | 101 | 115 |
| 750 | VLRYPTREQALSALE | 106 | 120 |
| 751 | TREQALSALESGQID | 111 | 125 |
| 752 | LSALESGQIDLIGTV | 116 | 130 |
| 753 | SGQIDLIGTVNGTDG | 121 | 135 |
| 754 | LIGTVNGTDGRQQSL | 126 | 140 |
| 755 | NGTDGRQQSLRLSVP | 131 | 145 |
| 756 | RQQSLRLSVPYAADH | 136 | 150 |
| 757 | RLSVPYAADHPVIVM | 141 | 155 |
| 758 | YAADHPVIVMPIGAR | 146 | 160 |
| 759 | PVIVMPIGARHVPAS | 151 | 165 |
| 760 | PIGARHVPASNLAGQ | 156 | 170 |
| 761 | HVPASNLAGQRLAVD | 161 | 175 |
| 762 | NLAGQRLAVDINYLP | 166 | 180 |
| 763 | RLAVDINYLPKETLA | 171 | 185 |
| 764 | INYLPKETLARAYPQ | 176 | 190 |
| 765 | KETLARAYPQATLHY | 181 | 195 |
| 766 | RAYPQATLHYFPSSE | 186 | 200 |
| 767 | ATLHYFPSSEQALAA | 191 | 205 |
| 768 | FPSSEQALAAVAYGQ | 196 | 210 |
| 769 | QALAAVAYGQADVFI | 201 | 215 |
| 770 | VAYGQADVFIGDALT | 206 | 220 |
| 771 | ADVFIGDALTTSHLV | 211 | 225 |
| 772 | GDALTTSHLVSQSYF | 216 | 230 |
| 773 | TSHLVSQSYFNDVRV | 221 | 235 |
| 774 | SQSYFNDVRVVAPAH | 226 | 240 |
| 775 | NDVRVVAPAHIATGG | 231 | 245 |
| 776 | VAPAHIATGGESFGV | 236 | 250 |
| 777 | IATGGESFGVRADNT | 241 | 255 |
| 778 | ESFGVRADNTRLLRV | 246 | 260 |
| 779 | RADNTRLLRVVNAVL | 251 | 265 |
| 780 | RLLRVVNAVLEAIPP | 256 | 270 |
| 781 | VNAVLEAIPPSEHRS | 261 | 275 |
| 782 | EAIPPSEHRSLIYRW | 266 | 280 |
| 783 | SEHRSLIYRWGLGSS | 271 | 285 |
| 784 | LIYRWGLGSSISLDF | 276 | 290 |
| 785 | GLGSSISLDFAHPAY | 281 | 295 |
| 786 | ISLDFAHPAYSAREQ | 286 | 300 |
| 787 | AHPAYSAREQQWMAD | 291 | 305 |
| 788 | SAREQQWMADHPVVK | 296 | 310 |
| 789 | QWMADHPVVKVAVLN | 301 | 315 |
| 790 | HPVVKVAVLNLFAPF | 306 | 320 |
| 791 | VAVLNLFAPFTLFRT | 311 | 325 |
| 792 | LFAPFTLFRTDEQFG | 316 | 330 |
| 793 | TLFRTDEQFGGISAA | 321 | 335 |
| 794 | DEQFGGISAAVLQLL | 326 | 340 |
| 795 | GISAAVLQLLQLRTG | 331 | 345 |
| 796 | VLQLLQLRTGLDFEI | 336 | 350 |
| 797 | QLRTGLDFEIIGVDT | 341 | 355 |
| 798 | LDFEIIGVDTVEELI | 346 | 360 |
| 799 | IGVDTVEELIAKLRS | 351 | 365 |
| 800 | VEELIAKLRSGEADM | 356 | 370 |
| 801 | AKLRSGEADMAGALF | 361 | 375 |
| 802 | GEADMAGALFVNSAR | 366 | 380 |
| 803 | AGALFVNSARESFLS | 371 | 385 |
| 804 | VNSARESFLSFSRPY | 376 | 390 |
| 805 | ESFLSFSRPYVRNGM | 381 | 395 |
| 806 | FSRPYVRNGMVIVTR | 386 | 400 |
| 807 | VRNGMVIVTRQDPDA | 391 | 405 |
| 808 | VIVTRQDPDAPVDAD | 396 | 410 |
| 809 | QDPDAPVDADHLDGR | 401 | 415 |
| 810 | PVDADHLDGRTVALV | 406 | 420 |
| 811 | HLDGRTVALVRNSAA | 411 | 425 |
| 812 | TVALVRNSAAIPLLQ | 416 | 430 |
| 813 | RNSAAIPLLORRYPQ | 421 | 435 |
| 814 | IPLLORRYPQAKVVT | 426 | 440 |
| 815 | RRYPQAKVVTADNPS | 431 | 445 |
| 816 | AKVVTADNPSEAMLM | 436 | 450 |
| 817 | ADNPSEAMLMVANGQ | 441 | 455 |
| 818 | EAMLMVANGQADAVV | 446 | 460 |
| 819 | VANGQADAVVQTQIS | 451 | 465 |
| 820 | ADAVVQTQISASYYV | 456 | 470 |
| 821 | QTQISASYYVNRYFA | 461 | 475 |
| 822 | ASYYVNRYFAGKLRI | 466 | 480 |
| 823 | NRYFAGKLRIASALD | 471 | 485 |
| 824 | GKLRIASALDLPPAE | 476 | 490 |
| 825 | ASALDLPPAEIALAT | 481 | 495 |
| 826 | LPPAEIALATTRGQT | 486 | 500 |
| 827 | IALATTRGQTELMSI | 491 | 505 |
| 828 | TRGQTELMSILNKAL | 496 | 510 |
| 829 | ELMSILNKALYSISN | 501 | 515 |
| 830 | LNKALYSISNDELAS | 506 | 520 |
| 831 | YSISNDELASIISRW | 511 | 525 |
| 832 | DELASIISRWRGSDG | 516 | 530 |
| 833 | IISRWRGSDGDPRTW | 521 | 535 |
| 834 | RGSDGDPRTWYAYRN | 526 | 540 |
| 835 | DPRTWYAYRNEIYLL | 531 | 545 |
| 836 | YAYRNEIYLLIGLGL | 536 | 550 |
| 837 | EIYLLIGLGLLSALL | 541 | 555 |
| 838 | IGLGLLSALLFLSWI | 546 | 560 |
| 839 | LSALLFLSWIVYLRR | 551 | 565 |
| 840 | FLSWIVYLRRQIRQR | 556 | 570 |
| 841 | VYLRRQIRQRKRAER | 561 | 575 |
| 842 | QIRQRKRAERALNDQ | 566 | 580 |
| 843 | KRAERALNDQLEFMR | 571 | 585 |
| 844 | ALNDQLEFMRVLIDG | 576 | 590 |
| 845 | LEFMRVLIDGTPNPI | 581 | 595 |
| 846 | VLIDGTPNPIYVRDK | 586 | 600 |
| 847 | TPNPIYVRDKEGRML | 591 | 605 |
| 848 | YVRDKEGRMLLCNDA | 596 | 610 |
| 849 | EGRMLLCNDAYLDTF | 601 | 615 |
| 850 | LCNDAYLDTFGVTAD | 606 | 620 |
| 851 | YLDTFGVTADAVLGK | 611 | 625 |
| 852 | GVTADAVLGKTIPEA | 616 | 630 |
| 853 | AVLGKTIPEANVVGD | 621 | 635 |
| 854 | TIPEANVVGDPALAR | 626 | 640 |
| 855 | NVVGDPALAREMHEF | 631 | 645 |
| 856 | PALAREMHEFLLTRV | 636 | 650 |
| 857 | EMHEFLLTRVAAERE | 641 | 655 |
| 858 | LLTRVAAEREPRFED | 646 | 660 |
| 859 | AAEREPRFEDRDVTL | 651 | 665 |
| 860 | PRFEDRDVTLHGRTR | 656 | 670 |
| 861 | RDVTLHGRTRHVYQW | 661 | 675 |
| 862 | HGRTRHVYQWTIPYG | 666 | 680 |
| 863 | HVYQWTIPYGDSLGE | 671 | 685 |
| 864 | TIPYGDSLGELKGII | 676 | 690 |
| 865 | DSLGELKGIIGGWID | 681 | 695 |
| 866 | LKGIIGGWIDITERA | 686 | 700 |
| 867 | GGWIDITERAELLRK | 691 | 705 |
| 868 | ITERAELLRKLHDAK | 696 | 710 |
| 869 | ELLRKLHDAKESADA | 701 | 715 |
| 870 | LHDAKESADAANRAK | 706 | 720 |
| 871 | ESADAANRAKTTFLA | 711 | 725 |
| 872 | ANRAKTTFLATMSHE | 716 | 730 |
| 873 | TTFLATMSHEIRTPM | 721 | 735 |
| 874 | TMSHEIRTPMNAIIG | 726 | 740 |
| 875 | IRTPMNAIIGMLELA | 731 | 745 |
| 876 | NAIIGMLELALLRPT | 736 | 750 |
| 877 | MLELALLRPTDQEPD | 741 | 755 |
| 878 | LLRPTDQEPDRQSIQ | 746 | 760 |
| 879 | DQEPDRQSIQVAYDS | 751 | 765 |
| 880 | RQSIQVAYDSARSLL | 756 | 770 |
| 881 | VAYDSARSLLELIGD | 761 | 775 |
| 882 | ARSLLELIGDILDIA | 766 | 780 |
| 883 | ELIGDILDIAKIEAG | 771 | 785 |
| 884 | ILDIAKIEAGKFDLA | 776 | 790 |
| 885 | KIEAGKFDLAPVRTA | 781 | 795 |
| 886 | KFDLAPVRTALRVLP | 786 | 800 |
| 887 | PVRTALRVLPEGAIR | 791 | 805 |
| 888 | LRVLPEGAIRVFDGL | 796 | 810 |
| 889 | EGAIRVFDGLARQKG | 801 | 815 |
| 890 | VFDGLARQKGIELVL | 806 | 820 |
| 891 | ARQKGIELVLKTDIV | 811 | 825 |
| 892 | IELVLKTDIVGVDDV | 816 | 830 |
| 893 | KTDIVGVDDVLIDPL | 821 | 835 |
| 894 | GVDDVLIDPLRMKQV | 826 | 840 |
| 895 | LIDPLRMKQVLSNLV | 831 | 845 |
| 896 | RMKQVLSNLVGNAIK | 836 | 850 |
| 897 | LSNLVGNAIKFTTEG | 841 | 855 |
| 898 | GNAIKFTTEGQVVLA | 846 | 860 |
| 899 | FTTEGQVVLAVTARP | 851 | 865 |
| 900 | QVVLAVTARPDGDAA | 856 | 870 |
| 901 | VTARPDGDAAHVQFS | 861 | 875 |
| 902 | DGDAAHVQFSVSDTG | 866 | 880 |
| 903 | HVQFSVSDTGCGISE | 871 | 885 |
| 904 | VSDTGCGISEADQRQ | 876 | 890 |
| 905 | CGISEADQRQLFKPF | 881 | 895 |
| 906 | ADQRQLFKPFSQVGG | 886 | 900 |
| 907 | LFKPFSQVGGSAEAG | 891 | 905 |
| 908 | SQVGGSAEAGPAPGT | 896 | 910 |
| 909 | SAEAGPAPGTGLGLS | 901 | 915 |
| 910 | PAPGTGLGLSISRRL | 906 | 920 |
| 911 | GLGLSISRRLVELMG | 911 | 925 |
| 912 | ISRRLVELMGGTLVM | 916 | 930 |
| 913 | VELMGGTLVMRSAPG | 921 | 935 |
| 914 | GTLVMRSAPGVGTTV | 926 | 940 |
| 915 | RSAPGVGTTVSVDLR | 931 | 945 |
| 916 | VGTTVSVDLRLTMVE | 936 | 950 |
| 917 | SVDLRLTMVEKSVQA | 941 | 955 |
| 918 | LTMVEKSVQAAPPAA | 946 | 960 |
| 919 | KSVQAAPPAAATAAT | 951 | 965 |
| 920 | APPAAATAATPSKPQ | 956 | 970 |
| 921 | ATAATPSKPQVSLRV | 961 | 975 |
| 922 | PSKPQVSLRVLVVDD | 966 | 980 |
| 923 | VSLRVLVVDDHKPNL | 971 | 985 |
| 924 | LVVDDHKPNLMLLRQ | 976 | 990 |
| 925 | HKPNLMLLRQQLDYL | 981 | 995 |
| 926 | MLLRQQLDYLGQRVI | 986 | 1000 |
| 927 | QLDYLGQRVIAADSG | 991 | 1005 |
| 928 | GQRVIAADSGEAALA | 996 | 1010 |
| 929 | AADSGEAALALWREH | 1001 | 1015 |
| 930 | EAALALWREHAFDVV | 1006 | 1020 |
| 931 | LWREHAFDVVITDCN | 1011 | 1025 |
| 932 | AFDVVITDCNMPGIS | 1016 | 1030 |
| 933 | ITDCNMPGISGYELA | 1021 | 1035 |
| 934 | MPGISGYELARRIRA | 1026 | 1040 |
| 935 | GYELARRIRAAEAAP | 1031 | 1045 |
| 936 | RRIRAAEAAPGYGRT | 1036 | 1050 |
| 937 | AEAAPGYGRTRCILF | 1041 | 1055 |
| 938 | GYGRTRCILFGFTAS | 1046 | 1060 |
| 939 | RCILFGFTASAQMDE | 1051 | 1065 |
| 940 | GFTASAQMDEAQRCR | 1056 | 1070 |
| 941 | AQMDEAQRCRAAGMD | 1061 | 1075 |
| 942 | AQRCRAAGMDDCLFK | 1066 | 1080 |
| 943 | AAGMDDCLFKPIGVD | 1071 | 1085 |
| 944 | DCLFKPIGVDALRQR | 1076 | 1090 |
| 945 | PIGVDALRQRLNEAV | 1081 | 1095 |
| 946 | ALRQRLNEAVARAAL | 1086 | 1100 |
| 947 | LNEAVARAALPTPPS | 1091 | 1105 |
| 948 | ARAALPTPPSPQAAA | 1096 | 1110 |
| 949 | PTPPSPQAAAPATDD | 1101 | 1115 |
| 950 | PQAAAPATDDATPTA | 1106 | 1120 |
| 951 | PATDDATPTAFSAES | 1111 | 1125 |
| 952 | ATPTAFSAESILALT | 1116 | 1130 |
| 953 | FSAESILALTQNDEA | 1121 | 1135 |
| 954 | ILALTONDEALIRQL | 1126 | 1140 |
| 955 | QNDEALIRQLLEEVI | 1131 | 1145 |
| 956 | LIRQLLEEVIRTNRA | 1136 | 1150 |
| 957 | LEEVIRTNRADVDQL | 1141 | 1155 |
| 958 | RTNRADVDQLQKLHQ | 1146 | 1160 |
| 959 | DVDQLQKLHQQADWP | 1151 | 1165 |
| 960 | QKLHQQADWPKVSDM | 1156 | 1170 |
| 961 | QADWPKVSDMAHRLA | 1161 | 1175 |
| 962 | KVSDMAHRLAGGARV | 1166 | 1180 |
| 963 | AHRLAGGARVVDAKA | 1171 | 1185 |
| 964 | GGARVVDAKAMIDTV | 1176 | 1190 |
| 965 | VDAKAMIDTVLALEK | 1181 | 1195 |
| 966 | MIDTVLALEKKAQGQ | 1186 | 1200 |
| 967 | LALEKKAQGQAGPSP | 1191 | 1205 |
| 968 | KAQGQAGPSPEIDGL | 1196 | 1210 |
| 969 | AGPSPEIDGLVRTLA | 1201 | 1215 |
| 970 | EIDGLVRTLAAQSAA | 1206 | 1220 |
| 971 | VRTLAAQSAALETQL | 1211 | 1225 |
| 972 | AQSAALETQLRAWLE | 1216 | 1230 |
| 973 | LETQLRAWLEQRPHQ | 1221 | 1235 |
| 974 | QLRAWLEQRPHQDQP | 1224 | 1238 |

| | |
|---|---|
| | Full Sequence |
| 2602 | MPAPHRLYPRSLICLAQALLAWALLAWAPAQASQELTLVG |
| | KAAVPDVEVALDGDDWRWLARKRVLTLGVYAPDIPPFDVT |
| | YGERYEGLTADYMAIIAHNLGMQAKVLRYPTREQALSALE |
| | SGQIDLIGTVNGTDGRQQSLRLSVPYAADHPVIVMPIGAR |
| | HVPASNLAGQRLAVDINYLPKETLARAYPQATLHYFPSSE |
| | QALAAVAYGQADVFIGDALTTSHLVSQSYFNDVRVVAPAH |
| | IATGGESFGVRADNTRLLRVVNAVLEAIPPSEHRSLIYRW |
| | GLGSSISLDFAHPAYSAREQQWMADHPVVKVAVLNLFAPF |
| | TLFRTDEQFGGISAAVLQLLQLRTGLDFEIIGVDTVEELI |
| | AKLRSGEADMAGALFVNSARESFLSFSRPYVRNGMVIVTR |
| | QDPDAPVDADHLDGRTVALVRNSAAIPLLQRRYPQAKVVT |
| | ADNPSEAMLMVANGQADAVVQTQISASYYVNRYFAGKLRI |
| | ASALDLPPAEIALATTRGQTELMSILNKALYSISNDELAS |
| | IISRWRGSDGDPRTWYAYRNEIYLLIGLGLLSALLFLSWI |
| | VYLRRQIRQRKRAERALNDQLEFMRVLIDGTPNPIYVRDK |
| | EGRMLLCNDAYLDTFGVTADAVLGKTIPEANVVGDPALAR |
| | EMHEFLLTRVAAEREPRFEDRDVTLHGRTRHVYQWTIPYG |
| | DSLGELKGIIGGWIDITERAELLRKLHDAKESADAANRAK |
| | TTFLATMSHEIRTPMNAIIGMLELALLRPTDQEPDRQSIQ |
| | VAYDSARSLLELIGDILDIAKIEAGKFDLAPVRTALRVLP |
| | EGAIRVFDGLARQKGIELVLKTDIVGVDDVLIDPLRMKQV |
| | LSNLVGNAIKFTTEGQVVLAVTARPDGDAAHVQFSVSDTG |
| | CGISEADQRQLFKPFSQVGGSAEAGPAPGTGLGLSISRRL |
| | VELMGGTLVMRSAPGVGTTVSVDLRLTMVEKSVQAAPPAA |
| | ATAATPSKPQVSLRVLVVDDHKPNLMLLRQQLDYLGQRVI |
| | AADSGEAALALWREHAFDVVITDCNMPGISGYELARRIRA |
| | AEAAPGYGRTRCILFGFTASAQMDEAQRCRAAGMDDCLFK |
| | PIGVDALRQRLNEAVARAALPTPPSPQAAAPATDDATPTA |
| | FSAESILALTQNDEALIRQLLEEVIRTNRADVDQLQKLHQ |
| | QADWPKVSDMAHRLAGGARVVDAKAMIDTVLALEKKAQGQ |
| | AGPSPEIDGLVRTLAAQSAALETQLRAWLEQRPHQDQP |

[0051] Table 7. PT(O) ANTS5—Overlapping peptides covering the entire sequence of NP_880086.1 1,4-alpha-glucan branching enzyme GlgB.

TABLE 7
PT(O) ANT 5-Overlapping peptides covering
the entire sequence of NP_880086.1 1,4-
alpha-glucan branching enzyme GlgB

| SEQ | | | |
|---|---|---|---|
| ID | | | |
| NO: | Peptide | Start | End |
| 975 | MMRDSPSIQGTLDAA | 1 | 15 |
| 976 | PSIQGTLDAATQHAL | 6 | 20 |
| 977 | TLDAATQHALLAGRH | 11 | 25 |
| 978 | TQHALLAGRHADPFS | 16 | 30 |
| 979 | LAGRHADPFSVLGPH | 21 | 35 |
| 980 | ADPFSVLGPHQAGAH | 26 | 40 |
| 981 | VLGPHQAGAHTVVRV | 31 | 45 |
| 982 | QAGAHTVVRVLAPGA | 36 | 50 |
| 983 | TVVRVLAPGARTVMA | 41 | 55 |
| 984 | LAPGARTVMAVLPGG | 46 | 60 |
| 985 | RTVMAVLPGGQRTPL | 51 | 65 |
| 986 | VLPGGQRTPLLPMQP | 56 | 70 |
| 987 | QRTPLLPMQPGLFEN | 61 | 75 |
| 988 | LPMQPGLFENTVPGL | 66 | 80 |
| 989 | GLFENTVPGLQPGAP | 71 | 85 |
| 990 | TVPGLQPGAPAAYRL | 76 | 90 |
| 991 | QPGAPAAYRLCIEWE | 81 | 95 |
| 992 | AAYRLCIEWEGGIQH | 86 | 100 |
| 993 | CIEWEGGIQHTADPY | 91 | 105 |
| 994 | GGIQHTADPYAFGPV | 96 | 110 |
| 995 | TADPYAFGPVLDAAQ | 101 | 115 |
| 996 | AFGPVLDAAQLDHCA | 106 | 120 |
| 997 | LDAAQLDHCAAGGWR | 111 | 125 |
| 998 | LDHCAAGGWRYLAGL | 116 | 130 |
| 999 | AGGWRYLAGLLGAHA | 121 | 135 |
| 1000 | YLAGLIGAHAASVDG | 126 | 140 |
| 1001 | LGAHAASVDGCAGTR | 131 | 145 |
| 1002 | ASVDGCAGTRFALWA | 136 | 150 |
| 1003 | CAGTRFALWAPNARR | 141 | 155 |
| 1004 | FALWAPNARRVAVVG | 146 | 160 |
| 1005 | PNARRVAVVGDFNGW | 151 | 165 |
| 1006 | VAVVGDFNGWDGRRH | 156 | 170 |
| 1007 | DFNGWDGRRHAMRLR | 161 | 175 |
| 1008 | DGRRHAMRLRYPAGV | 166 | 180 |
| 1009 | AMRLRYPAGVWELFL | 171 | 185 |
| 1010 | YPAGVWELFLPDVGP | 176 | 190 |
| 1011 | WELFLPDVGPGARYK | 181 | 195 |
| 1012 | PDVGPGARYKFQVLG | 186 | 200 |
| 1013 | GARYKFQVLGADGHT | 191 | 205 |
| 1014 | FQVLGADGHTVLKAD | 196 | 210 |
| 1015 | ADGHTVLKADPLARQ | 201 | 215 |
| 1016 | VLKADPLARQAEAPP | 206 | 220 |
| 1017 | PLARQAEAPPATASI | 211 | 225 |
| 1018 | AEAPPATASIVPDER | 216 | 230 |
| 1019 | ATASIVPDERPFAWT | 221 | 235 |
| 1020 | VPDERPFAWTDKAWM | 226 | 240 |
| 1021 | PFAWTDKAWMEQRAA | 231 | 245 |
| 1022 | DKAWMEQRAARQRCD | 236 | 250 |
| 1023 | EQRAARQRCDAPISI | 241 | 255 |
| 1024 | RQRCDAPISIYEVHA | 246 | 260 |
| 1025 | APISIYEVHAGSWFD | 251 | 265 |
| 1026 | YEVHAGSWFDDAGAP | 256 | 270 |
| 1027 | GSWFDDAGAPRWQNL | 261 | 275 |
| 1028 | DAGAPRWQNLAARLP | 266 | 280 |
| 1029 | RWQNLAARLPEYARS | 271 | 285 |
| 1030 | AARLPEYARSLGFTH | 276 | 290 |
| 1031 | EYARSLGFTHIELLP | 281 | 295 |
| 1032 | LGFTHIELLPVMAHP | 286 | 300 |
| 1033 | IELLPVMAHPFGGSW | 291 | 305 |
| 1034 | VMAHPFGGSWGYQPL | 296 | 310 |
| 1035 | FGGSWGYQPLGLFAP | 301 | 315 |
| 1036 | GYQPLGLFAPAAAHG | 306 | 320 |
| 1037 | GLFAPAAAHGAPADF | 311 | 325 |
| 1038 | AAAHGAPADFAHFVD | 316 | 330 |
| 1039 | APADFAHFVDRCHEA | 321 | 335 |
| 1040 | AHFVDRCHEAGLGVI | 326 | 340 |
| 1041 | RCHEAGLGVILDWVP | 331 | 345 |
| 1042 | GLGVILDWVPAHFPD | 336 | 350 |
| 1043 | LDWVPAHFPDDAHGL | 341 | 355 |
| 1044 | AHFPDDAHGLARLDG | 346 | 360 |
| 1045 | DAHGLARLDGTPLYE | 351 | 365 |
| 1046 | ARLDGTPLYEHADPR | 356 | 370 |
| 1047 | TPLYEHADPREGRHP | 361 | 375 |
| 1048 | HADPREGRHPDWNTL | 366 | 380 |
| 1049 | EGRHPDWNTLIYNYG | 371 | 385 |
| 1050 | DWNTLIYNYGRREVR | 376 | 390 |
| 1051 | IYNYGRREVRTFLIA | 381 | 395 |
| 1052 | RREVRTFLIASAIHW | 386 | 400 |
| 1053 | TFLIASAIHWLRHYH | 391 | 405 |
| 1054 | SAIHWLRHYHVDGLR | 396 | 410 |
| 1055 | LRHYHVDGLRVDAVA | 401 | 415 |
| 1056 | VDGLRVDAVASMLYR | 406 | 420 |
| 1057 | VDAVASMLYRDYSRP | 411 | 425 |
| 1058 | SMLYRDYSRPAGQWI | 416 | 430 |
| 1059 | DYSRPAGQWIPNRHG | 421 | 435 |
| 1060 | AGQWIPNRHGRRENL | 426 | 440 |
| 1061 | PNRHGRRENLEAIDF | 431 | 445 |
| 1062 | RRENLEAIDFLRELN | 436 | 450 |
| 1063 | EAIDFLRELNAAVGV | 441 | 455 |
| 1064 | LRELNAAVGVQCPGA | 446 | 460 |
| 1065 | AAVGVQCPGAITVAE | 451 | 465 |
| 1066 | QCPGAITVAEESTAW | 456 | 470 |
| 1067 | ITVAEESTAWPGVTA | 461 | 475 |
| 1068 | ESTAWPGVTAPVANG | 466 | 480 |
| 1069 | PGVTAPVANGGLGFD | 471 | 485 |
| 1070 | PVANGGLGFDYKWNM | 476 | 490 |
| 1071 | GLGFDYKWNMGWMHD | 481 | 495 |
| 1072 | YKWNMGWMHDTLRYM | 486 | 500 |
| 1073 | GWMHDTLRYMRRDPI | 491 | 505 |
| 1074 | TLRYMRRDPIHRRHH | 496 | 510 |
| 1075 | RRDPIHRRHHHHDLS | 501 | 515 |
| 1076 | HRRHHHHDLSFGMVY | 506 | 520 |
| 1077 | HHDLSFGMVYAYAER | 511 | 525 |
| 1078 | FGMVYAYAERFVLPL | 516 | 530 |
| 1079 | AYAERFVLPLSHDEV | 521 | 535 |
| 1080 | FVLPLSHDEVVHGKG | 526 | 540 |
| 1081 | SHDEVVHGKGSLLGK | 531 | 545 |
| 1082 | VHGKGSLLGKMPGER | 536 | 550 |
| 1083 | SLLGKMPGERAAQLA | 541 | 555 |
| 1084 | MPGERAAQLAQLRLY | 546 | 560 |
| 1085 | AAQLAQLRLYYAFMW | 551 | 565 |
| 1086 | QLRLYYAFMWAHPGK | 556 | 570 |
| 1087 | YAFMWAHPGKKLLFM | 561 | 575 |
| 1088 | AHPGKKLLFMGGEFG | 566 | 580 |
| 1089 | KLLFMGGEFGQQGEW | 571 | 585 |
| 1090 | GGEFGQQGEWNHDAM | 576 | 590 |
| 1091 | QQGEWNHDAMLQWSL | 581 | 595 |
| 1092 | NHDAMLQWSLLDDPA | 586 | 600 |
| 1093 | LOWSLLDDPAHRGLQ | 591 | 605 |
| 1094 | LDDPAHRGLQRLVAD | 596 | 610 |
| 1095 | HRGLQRLVADLNHVY | 601 | 615 |
| 1096 | RLVADLNHVYATLPE | 606 | 620 |
| 1097 | LNHVYATLPELHCRD | 611 | 625 |
| 1098 | ATLPELHCRDADPSG | 616 | 630 |
| 1099 | LHCRDADPSGFAWIV | 621 | 635 |
| 1100 | ADPSGFAWIVGDDAD | 626 | 640 |
| 1101 | FAWIVGDDADNSVLA | 631 | 645 |
| 1102 | GDDADNSVLAFARVD | 636 | 650 |
| 1103 | NSVLAFARVDASHCL | 641 | 655 |
| 1104 | FARVDASHCLVAVCN | 646 | 660 |
| 1105 | ASHCLVAVCNFTPVP | 651 | 665 |
| 1106 | VAVCNFTPVPRPGYR | 656 | 670 |
| 1107 | FTPVPRPGYRFGVPH | 661 | 675 |
| 1108 | RPGYRFGVPHAGDWR | 666 | 680 |
| 1109 | FGVPHAGDWRVRVDT | 671 | 685 |
| 1110 | AGDWRVRVDTGATRY | 676 | 690 |
| 1111 | VRVDTGATRYGGAGG | 681 | 695 |
| 1112 | GATRYGGAGGGPPIC | 686 | 700 |
| 1113 | GGAGGGPPICLRSEP | 691 | 705 |
| 1114 | GPPICLRSEPIPAHG | 696 | 710 |
| 1115 | LRSEPIPAHGHPQSL | 701 | 715 |
| 1116 | IPAHGHPQSLVLDLP | 706 | 720 |
| 1117 | HPQSLVLDLPGFTAL | 711 | 725 |
| 1118 | VLDLPGFTALYLRHS | 716 | 730 |
| 1119 | LDLPGFTALYLRHSE | 717 | 731 |

| | |
|---|---|
| | Full Sequence |
| 2603 | MMRDSPSIQGTLDAATQHALLAGRHADPFSVLGPHQAGAHT |
| | VVRVLAPGARTVMAVLPGGQRTPLLPMQPGLFENTVPGLQ |
| | PGAPAAYRLCIEWEGGIQHTADPYAFGPVLDAAQLDHCAA |
| | GGWRYLAGLLGAHAASVDGCAGTRFALWAPNARRVAVVGD |
| | FNGWDGRRHAMRLRYPAGVWELFLPDVGPGARYKFQVLGA |
| | DGHTVLKADPLARQAEAPPATASIVPDERPFAWTDKAWME |
| | QRAARQRCDAPISIYEVHAGSWFDDAGAPRWQNLAARLPE |
| | YARSLGFTHIELLPVMAHPFGGSWGYQPLGLFAPAAAHGA |
| | PADFAHFVDRCHEAGLGVILDWVPAHFPDDAHGLARLDGT |
| | PLYEHADPREGRHPDWNTLIYNYGRREVRTFLIASAIHWL |
| | RHYHVDGLRVDAVASMLYRDYSRPAGQWIPNRHGRRENLE |
| | AIDFLRELNAAVGVQCPGAITVAEESTAWPGVTAPVANGG |
| | LGFDYKWNMGWMHDTLRYMRRDPIHRRHHHHDLSFGMVYA |
| | YAERFVLPLSHDEVVHGKGSLLGKMPGERAAQLAQLRLYY |
| | AFMWAHPGKKLLFMGGEFGQQGEWNHDAMLQWSLLDDPAH |
| | RGLQRLVADLNHVYATLPELHCRDADPSGFAWIVGDDADN |
| | SVLAFARVDASHCLVAVCNFTPVPRPGYRFGVPHAGDWRV |
| | RVDTGATRYGGAGGGPPICLRSEPIPAHGHPQSLVLDLPG |
| | FTALYLRHSE |

[0052] TABLE 8 PT(O) ANT 6—Overlapping peptides covering the entire sequence of NP_881921.1 membrane protein [B. pertussis Tohama I

TABLE 8
PT(O) ANT 6-Overlapping peptides covering
the entire sequence of NP_881921.1 inner
protein [B. pertussis Tohama I

| SEQ | | | |
|---|---|---|---|
| ID | | | |
| NO: | Peptide | Start | End |
| 1120 | MTVPRPESIIPPAGN | 1 | 15 |
| 1121 | PESIIPPAGNAATGA | 6 | 20 |
| 1122 | PPAGNAATGAAGIAR | 11 | 25 |
| 1123 | AATGAAGIARAFKRA | 16 | 30 |
| 1124 | AGIARAFKRALVSQC | 21 | 35 |
| 1125 | AFKRALVSQCHPNML | 26 | 40 |
| 1126 | LVSQCHPNMLFAVLL | 31 | 45 |
| 1127 | HPNMLFAVLLPFLIA | 36 | 50 |
| 1128 | FAVLLPFLIALLGAI | 41 | 55 |
| 1129 | PFLIALLGAILLLWL | 46 | 60 |
| 1130 | LLGAILLLWLFWTPL | 51 | 65 |
| 1131 | LLLWLFWTPLNEWLR | 56 | 70 |
| 1132 | FWTPLNEWLRFEASQ | 61 | 75 |
| 1133 | NEWLRFEASQWQAIN | 66 | 80 |
| 1134 | FEASQWQAINQVDDW | 71 | 85 |
| 1135 | WQAINQVDDWMVAAG | 76 | 90 |
| 1136 | QVDDWMVAAGLFSLK | 81 | 95 |
| 1137 | MVAAGLFSLKIYLVP | 86 | 100 |
| 1138 | LFSLKIYLVPVIAAA | 91 | 105 |
| 1139 | IYLVPVIAAAILLPI | 96 | 110 |
| 1140 | VIAAAILLPISGILG | 101 | 115 |
| 1141 | ILLPISGILGLAIAA | 106 | 120 |
| 1142 | SGILGLAIAAVFVMP | 111 | 125 |
| 1143 | LAIAAVFVMPLVLRH | 116 | 130 |
| 1144 | VFVMPLVLRHVGGRE | 121 | 135 |
| 1145 | LVLRHVGGREYAGLA | 126 | 140 |
| 1146 | VGGREYAGLARQGRN | 131 | 145 |
| 1147 | YAGLARQGRNATAVS | 136 | 150 |
| 1148 | RQGRNATAVSVWNAL | 141 | 155 |
| 1149 | ATAVSVWNALWVSLA | 146 | 160 |
| 1150 | VWNALWVSLAFGAGW | 151 | 165 |
| 1151 | WVSLAFGAGWLLTLP | 156 | 170 |
| 1152 | FGAGWLLTLPFWLIP | 161 | 175 |
| 1153 | LLTLPFWLIPPMVVI | 166 | 180 |
| 1154 | FWLIPPMVVILSVFW | 171 | 185 |
| 1155 | PMVVILSVFWWAFAF | 176 | 190 |
| 1156 | LSVFWWAFAFTRMLR | 181 | 195 |
| 1157 | WAFAFTRMLRLDAIV | 186 | 200 |
| 1158 | TRMLRLDAIVEHASP | 191 | 205 |
| 1159 | LDAIVEHASPAERAI | 196 | 210 |
| 1160 | EHASPAERAILLKRH | 201 | 215 |
| 1161 | AERAILLKRHNSGFW | 206 | 220 |
| 1162 | LLKRHNSGFWLIGLV | 211 | 225 |
| 1163 | NSGFWLIGLVCSLLN | 216 | 230 |
| 1164 | LIGLVCSLLNLLPPA | 221 | 235 |
| 1165 | CSLLNLLPPAWIILP | 226 | 240 |
| 1166 | LLPPAWIILPVFSGL | 23 | 245 |
| 1167 | WIILPVFSGLVYAHY | 236 | 250 |
| 1168 | VFSGLVYAHYGLDAL | 24 | 255 |
| 1169 | VYAHYGLDALQRLRQ | 246 | 260 |
| 1170 | GLDALQRLRQERAID | 251 | 265 |
| 1171 | LDALQRLRQERAIDV | 252 | 266 |

| | |
|---|---|
| | Full Sequence |
| 2604 | MTVPRPESIIPPAGNAATGAAGIARAFKRALVSQCHPNMLF |
| | AVLLPFLIALLGAILLLWLFWTPLNEWLRFEASQWQAINQ |
| | VDDWMVAAGLFSLKIYLVPVIAAAILLPISGILGLAIAAV |
| | FVMPLVLRHVGGREYAGLARQGRNATAVSVWNALWVSLAF |
| | GAGWLLTLPFWLIPPMVVILSVFWWAFAFTRMLRLDAIVE |
| | HASPAERAILLKRHNSGFWLIGLVCSLLNLLPPAWIILPV |
| | FSGLVYAHYGLDALQRLRQERAIDV |

[0053] TABLE 9 PT(O) ANT 7—Overlapping peptides covering the entire sequence of NP_882013.1 BrkA autotransporter [B. pertussis Tohama I].

TABLE 9
PT(O) ANT 7-Overlapping peptides covering
the entire sequence of NP_882013.1 BrkA
autotransporter [B. pertussis Tohama I]

| SEQ ID | | | |
|---|---|---|---|
| NO: | Peptide | Start | End |
| 1172 | MYLDRFRQCPSSLQI | 1 | 15 |
| 1173 | FRQCPSSLQIPRSAW | 6 | 20 |
| 1174 | SSLQIPRSAWRLHAL | 11 | 25 |
| 1175 | PRSAWRLHALAAALA | 16 | 30 |
| 1176 | RLHALAAALALAGMA | 21 | 35 |
| 1177 | AAALALAGMARLAPA | 26 | 40 |
| 1178 | LAGMARLAPAAAQAP | 31 | 45 |
| 1179 | RLAPAAAQAPQPPVA | 36 | 50 |
| 1180 | AAQAPQPPVAGAPHA | 41 | 55 |
| 1181 | QPPVAGAPHAQDAGQ | 46 | 60 |
| 1182 | GAPHAQDAGQEGEFD | 51 | 65 |
| 1183 | QDAGQEGEFDHRDNT | 56 | 70 |
| 1184 | EGEFDHRDNTLIAVF | 61 | 75 |
| 1185 | HRDNTLIAVFDDGVG | 66 | 80 |
| 1186 | LIAVFDDGVGINLDD | 71 | 85 |
| 1187 | DDGVGINLDDDPDEL | 76 | 90 |
| 1188 | INLDDDPDELGETAP | 81 | 95 |
| 1189 | DPDELGETAPPTLKD | 86 | 100 |
| 1190 | GETAPPTLKDIHISV | 91 | 105 |
| 1191 | PTLKDIHISVEHKNP | 96 | 110 |
| 1192 | IHISVEHKNPMSKPA | 101 | 115 |
| 1193 | EHKNPMSKPAIGVRV | 106 | 120 |
| 1194 | MSKPAIGVRVSGAGR | 111 | 125 |
| 1195 | IGVRVSGAGRALTLA | 116 | 130 |
| 1196 | SGAGRALTLAGSTID | 121 | 135 |
| 1197 | ALTLAGSTIDATEGG | 126 | 140 |
| 1198 | GSTIDATEGGIPAVV | 131 | 145 |
| 1199 | ATEGGIPAVVRRGGT | 136 | 150 |
| 1200 | IPAVVRRGGTLELDG | 141 | 155 |
| 1201 | RRGGTLELDGVTVAG | 146 | 160 |
| 1202 | LELDGVTVAGGEGME | 151 | 165 |
| 1203 | VTVAGGEGMEPMTVS | 156 | 170 |
| 1204 | GEGMEPMTVSDAGSR | 161 | 175 |
| 1205 | PMTVSDAGSRLSVRG | 166 | 180 |
| 1206 | DAGSRLSVRGGVLGG | 171 | 185 |
| 1207 | LSVRGGVLGGEAPGV | 176 | 190 |
| 1208 | GVLGGEAPGVGLVRA | 181 | 195 |
| 1209 | EAPGVGLVRAAQGGQ | 186 | 200 |
| 1210 | GLVRAAQGGQASIID | 191 | 205 |
| 1211 | AQGGQASIIDATLQS | 196 | 210 |
| 1212 | ASIIDATLQSILGPA | 201 | 215 |
| 1213 | ATLQSILGPALIADG | 206 | 220 |
| 1214 | ILGPALIADGGSISV | 211 | 225 |
| 1215 | LIADGGSISVAGGSI | 216 | 230 |
| 1216 | GSISVAGGSIDMDMG | 221 | 235 |
| 1217 | AGGSIDMDMGPGFPP | 226 | 240 |
| 1218 | DMDMGPGFPPPPPPL | 231 | 245 |
| 1219 | PGFPPPPPPLPGAPL | 236 | 250 |
| 1220 | PPPPLPGAPLAAHPP | 241 | 255 |
| 1221 | PGAPLAAHPPLDRVA | 246 | 260 |
| 1222 | AAHPPLDRVAAVHAG | 251 | 265 |
| 1223 | LDRVAAVHAGQDGKV | 256 | 270 |
| 1224 | AVHAGQDGKVTLREV | 261 | 275 |
| 1225 | QDGKVTLREVALRAH | 266 | 280 |
| 1226 | TLREVALRAHGPQAT | 271 | 285 |
| 1227 | ALRAHGPQATGVYAY | 276 | 290 |
| 1228 | GPQATGVYAYMPGSE | 281 | 295 |
| 1229 | GVYAYMPGSEITLQG | 286 | 300 |
| 1230 | MPGSEITLQGGTVSV | 291 | 305 |
| 1231 | ITLQGGTVSVQGDDG | 296 | 310 |
| 1232 | GTVSVQGDDGAGVVA | 301 | 315 |
| 1233 | QGDDGAGVVAGAGLL | 306 | 320 |
| 1234 | AGVVAGAGLLDALPP | 311 | 325 |
| 1235 | GAGLLDALPPGGTVR | 316 | 330 |
| 1236 | DALPPGGTVRLDGTT | 321 | 335 |
| 1237 | GGTVRLDGTTVSTDG | 326 | 340 |
| 1238 | LDGTTVSTDGANTDA | 331 | 345 |
| 1239 | VSTDGANTDAVLVRG | 336 | 350 |
| 1240 | ANTDAVLVRGDAARA | 341 | 355 |
| 1241 | VLVRGDAARAEVVNT | 346 | 360 |
| 1242 | DAARAEVVNTVLRTA | 351 | 365 |
| 1243 | EVVNTVLRTAKSLAA | 356 | 370 |
| 1244 | VLRTAKSLAAGVSAQ | 361 | 375 |
| 1245 | KSLAAGVSAQHGGRV | 366 | 380 |
| 1246 | GVSAQHGGRVTLRQT | 371 | 385 |
| 1247 | HGGRVTLRQTRIETA | 376 | 390 |
| 1248 | TLRQTRIETAGAGAE | 381 | 395 |
| 1249 | RIETAGAGAEGISVL | 386 | 400 |
| 1250 | GAGAEGISVLGFEPQ | 391 | 405 |
| 1251 | GISVLGFEPQSGSGP | 396 | 410 |
| 1252 | GFEPQSGSGPASVDM | 401 | 415 |
| 1253 | SGSGPASVDMQGGSI | 406 | 420 |
| 1254 | ASVDMQGGSITTTGN | 411 | 425 |
| 1255 | QGGSITTTGNRAAGI | 416 | 430 |
| 1256 | TTTGNRAAGIALTHG | 421 | 435 |
| 1257 | RAAGIALTHGSARLE | 426 | 440 |
| 1258 | ALTHGSARLEGVAVR | 431 | 445 |
| 1259 | SARLEGVAVRAEGSG | 436 | 450 |
| 1260 | GVAVRAEGSGSSAAQ | 441 | 455 |
| 1261 | AEGSGSSAAQLANGT | 446 | 460 |
| 1262 | SSAAQLANGTLVVSA | 451 | 465 |
| 1263 | LANGTLVVSAGSLAS | 456 | 470 |
| 1264 | LVVSAGSLASAQSGA | 461 | 475 |
| 1265 | GSLASAQSGAISVTD | 466 | 480 |
| 1266 | AQSGAISVTDTPLKL | 471 | 485 |
| 1267 | ISVTDTPLKLMPGAL | 476 | 490 |
| 1268 | TPLKLMPGALASSTV | 481 | 495 |
| 1269 | MPGALASSTVSVRLT | 486 | 500 |
| 1270 | ASSTVSVRLTDGATA | 491 | 505 |
| 1271 | SVRLTDGATAQGGNG | 496 | 510 |
| 1272 | DGATAQGGNGVFLQQ | 501 | 515 |
| 1273 | QGGNGVFLQQHSTIP | 506 | 520 |
| 1274 | VFLQQHSTIPVAVAL | 511 | 525 |
| 1275 | HSTIPVAVALESGAL | 516 | 530 |
| 1276 | VAVALESGALARGDI | 521 | 535 |
| 1277 | ESGALARGDIVADGN | 526 | 540 |
| 1278 | ARGDIVADGNKPLDA | 531 | 545 |
| 1279 | VADGNKPLDAGISLS | 536 | 550 |
| 1280 | KPLDAGISLSVASGA | 541 | 555 |
| 1281 | GISLSVASGAAWHGA | 546 | 560 |
| 1282 | VASGAAWHGATQVLQ | 551 | 565 |
| 1283 | AWHGATQVLQSATLG | 556 | 570 |
| 1284 | TQVLQSATLGKGGTW | 561 | 575 |
| 1285 | SATLGKGGTWVVNAD | 566 | 580 |
| 1286 | KGGTWVVNADSRVQD | 571 | 585 |
| 1287 | VVNADSRVQDMSMRG | 576 | 590 |
| 1288 | SRVQDMSMRGGRVEF | 581 | 595 |
| 1289 | MSMRGGRVEFQAPAP | 586 | 600 |
| 1290 | GRVEFQAPAPEASYK | 591 | 605 |
| 1291 | QAPAPEASYKTLTLQ | 596 | 610 |
| 1292 | EASYKTLTLQTLDGN | 601 | 615 |
| 1293 | TLTLQTLDGNGVFVL | 606 | 620 |
| 1294 | TLDGNGVFVLNTNVA | 611 | 625 |
| 1295 | GVFVLNTNVAAGQND | 616 | 630 |
| 1296 | NTNVAAGQNDQLRVT | 621 | 635 |
| 1297 | AGQNDQLRVTGRADG | 626 | 640 |
| 1298 | QLRVTGRADGQHRVL | 631 | 645 |
| 1299 | GRADGQHRVLVRNAG | 636 | 650 |
| 1300 | QHRVLVRNAGGEADS | 641 | 655 |
| 1301 | VRNAGGEADSRGARL | 646 | 660 |
| 1302 | GEADSRGARLGLVHT | 651 | 665 |
| 1303 | RGARLGLVHTQGQGN | 656 | 670 |
| 1304 | GLVHTQGQGNATFRL | 661 | 675 |
| 1305 | QGQGNATFRLANVGK | 666 | 680 |
| 1306 | ATFRLANVGKAVDLG | 671 | 685 |
| 1307 | ANVGKAVDLGTWRYS | 676 | 690 |
| 1308 | AVDLGTWRYSLAEDP | 681 | 695 |
| 1309 | TWRYSLAEDPKTHVW | 686 | 700 |
| 1310 | LAEDPKTHVWSLQRA | 691 | 705 |
| 1311 | KTHVWSLQRAGQALS | 696 | 710 |
| 1312 | SLQRAGQALSGAANA | 701 | 715 |
| 1313 | GQALSGAANAAVNAA | 706 | 720 |
| 1314 | GAANAAVNAADLSSI | 711 | 725 |
| 1315 | AVNAADLSSIALAES | 716 | 730 |
| 1316 | DLSSIALAESNALDK | 721 | 735 |
| 1317 | ALAESNALDKRLGEL | 726 | 740 |
| 1318 | NALDKRLGELRLRAD | 731 | 745 |
| 1319 | RLGELRLRADAGGPW | 736 | 750 |
| 1320 | RLRADAGGPWARTFS | 741 | 755 |
| 1321 | AGGPWARTFSERQQI | 746 | 760 |
| 1322 | ARTFSERQQISNRHA | 751 | 765 |
| 1323 | ERQQISNRHARAYDQ | 756 | 770 |
| 1324 | SNRHARAYDQTVSGL | 761 | 775 |
| 1325 | RAYDQTVSGLEIGLD | 766 | 780 |
| 1326 | TVSGLEIGLDRGWSA | 771 | 785 |
| 1327 | EIGLDRGWSASGGRW | 776 | 790 |
| 1328 | RGWSASGGRWYAGGL | 781 | 795 |
| 1329 | SGGRWYAGGLLGYTY | 786 | 800 |
| 1330 | YAGGLLGYTYADRTY | 791 | 805 |
| 1331 | LGYTYADRTYPGDGG | 796 | 810 |
| 1332 | ADRTYPGDGGGKVKG | 801 | 815 |
| 1333 | PGDGGGKVKGLHVGG | 806 | 820 |
| 1334 | GKVKGLHVGGYAAYV | 811 | 825 |
| 1335 | LHVGGYAAYVGDGGY | 816 | 830 |
| 1336 | YAAYVGDGGYYLDTV | 821 | 835 |
| 1337 | GDGGYYLDTVLRLGR | 826 | 840 |
| 1338 | YLDTVLRLGRYDQQY | 831 | 845 |
| 1339 | LRLGRYDQQYNIAGT | 836 | 850 |
| 1340 | YDQQYNIAGTDGGRV | 841 | 855 |
| 1341 | NIAGTDGGRVTADYR | 846 | 860 |
| 1342 | DGGRVTADYRTSGAA | 851 | 865 |
| 1343 | TADYRTSGAAWSLEG | 856 | 870 |
| 1344 | TSGAAWSLEGGRRFE | 861 | 875 |
| 1345 | WSLEGGRRFELPNDW | 866 | 880 |
| 1346 | GRRFELPNDWFAEPQ | 871 | 885 |
| 1347 | LPNDWFAEPQAEVML | 876 | 890 |
| 1348 | FAEPQAEVMLWRTSG | 881 | 895 |
| 1349 | AEVMLWRTSGKRYRA | 886 | 900 |
| 1350 | WRTSGKRYRASNGLR | 891 | 905 |
| 1351 | KRYRASNGLRVKVDA | 896 | 910 |
| 1352 | SNGLRVKVDANTATL | 901 | 915 |
| 1353 | VKVDANTATLGRLGL | 906 | 920 |
| 1354 | NTATLGRLGLRFGRR | 911 | 925 |
| 1355 | GRLGLRFGRRIALAG | 916 | 930 |
| 1356 | RFGRRIALAGGNIVQ | 921 | 935 |
| 1357 | IALAGGNIVQPYARL | 926 | 940 |
| 1358 | GNIVQPYARLGWTQE | 931 | 945 |
| 1359 | PYARLGWTQEFKSTG | 936 | 950 |
| 1360 | GWTQEFKSTGDVRTN | 941 | 955 |
| 1361 | FKSTGDVRTNGIGHA | 946 | 960 |
| 1362 | DVRTNGIGHAGAGRH | 951 | 965 |
| 1363 | GIGHAGAGRHGRVEL | 956 | 970 |
| 1364 | GAGRHGRVELGAGVD | 961 | 975 |
| 1365 | GRVELGAGVDAALGK | 966 | 980 |
| 1366 | GAGVDAALGKGHNLY | 971 | 985 |
| 1367 | AALGKGHNLYASYEY | 976 | 990 |
| 1368 | GHNLYASYEYAAGDR | 981 | 995 |
| 1369 | ASYEYAAGDRINIPW | 986 | 1000 |
| 1370 | AAGDRINIPWSFHAG | 991 | 1005 |
| 1371 | INIPWSFHAGYRYSF | 996 | 1010 |

| | |
|---|---|
| | Full Sequence |
| 2605 | MYLDRFRQCPSSLQIPRSAWRLHALAAALALAGMARLAPAA |
| | AQAPQPPVAGAPHAQDAGQEGEFDHRDNTLIAVFDDGVGI |
| | NLDDDPDELGETAPPTLKDIHISVEHKNPMSKPAIGVRVS |
| | GAGRALTLAGSTIDATEGGIPAVVRRGGTLELDGVTVAGG |
| | EGMEPMTVSDAGSRLSVRGGVLGGEAPGVGLVRAAQGGQA |
| | SIIDATLQSILGPALIADGGSISVAGGSIDMDMGPGFPPP |
| | PPPLPGAPLAAHPPLDRVAAVHAGQDGKVTLREVALRAHG |
| | PQATGVYAYMPGSEITLQGGTVSVQGDDGAGVVAGAGLLD |
| | ALPPGGTVRLDGTTVSTDGANTDAVLVRGDAARAEVVNTV |
| | LRTAKSLAAGVSAQHGGRVTLRQTRIETAGAGAEGISVLG |
| | FEPQSGSGPASVDMQGGSITTTGNRAAGIALTHGSARLEG |
| | VAVRAEGSGSSAAQLANGTLVVSAGSLASAQSGAISVTDT |
| | PLKLMPGALASSTVSVRLTDGATAQGGNGVFLQQHSTIPV |
| | AVALESGALARGDIVADGNKPLDAGISLSVASGAAWHGAT |
| | QVLQSATLGKGGTWVVNADSRVQDMSMRGGRVEFQAPAPE |
| | ASYKTLTLQTLDGNGVFVLNTNVAAGQNDQLRVTGRADGQ |
| | HRVLVRNAGGEADSRGARLGLVHTQGQGNATFRLANVGKA |
| | VDLGTWRYSLAEDPKTHVWSLQRAGQALSGAANAAVNAAD |
| | LSSIALAESNALDKRLGELRLRADAGGPWARTFSERQQIS |
| | NRHARAYDQTVSGLEIGLDRGWSASGGRWYAGGLLGYTYA |
| | DRTYPGDGGGKVKGLHVGGYAAYVGDGGYYLDTVLRLGRY |
| | DQQYNIAGTDGGRVTADYRTSGAAWSLEGGRRFELPNDWF |
| | AEPQAEVMLWRTSGKRYRASNGLRVKVDANTATLGRLGLR |
| | FGRRIALAGGNIVQPYARLGWTQEFKSTGDVRTNGIGHAG |
| | AGRHGRVELGAGVDAALGKGHNLYASYEYAAGDRINIPWS |
| | FHAGYRYSF |

[0054] TABLE 10 PT(O) ANT 8—Overlapping peptides covering the entire sequence of NP_879664.1 NADH-quinone oxidoreductase subunit N [B. pertussis Tohama I].

TABLE 10
PT(O) ANT 8-Overlapping peptides covering
the entire sequence of NP_879664.1 NADH-
quinone subunit N [B. pertussis Tohama I]

| SEQ ID | | | |
|---|---|---|---|
| NO: | Peptide | Start | End |
| 1372 | MMQSHLDFALATPEI | 1 | 15 |
| 1373 | LDFALATPEILLLVL | 6 | 20 |
| 1374 | ATPEILLLVLGLAIL | 11 | 25 |
| 1375 | LLLVLGLAILLIDAV | 16 | 30 |
| 1376 | GLAILLIDAVSSHPE | 21 | 35 |
| 1377 | LIDAVSSHPERKTTF | 26 | 40 |
| 1378 | SSHPERKTTFVLTLA | 31 | 45 |
| 1379 | RKTTFVLTLATLAAL | 36 | 50 |
| 1380 | VLTLATLAALTVVSL | 41 | 55 |
| 1381 | TLAALTVVSLLQWRD | 46 | 60 |
| 1382 | TVVSLLQWRDGVEGQ | 51 | 65 |
| 1383 | LOWRDGVEGQTENGL | 56 | 70 |
| 1384 | GVEGQTFNGLYVTDS | 61 | 75 |
| 1385 | TFNGLYVTDSLAHLL | 66 | 80 |
| 1386 | YVTDSLAHLLKVASY | 71 | 85 |
| 1387 | LAHLLKVASYIAVAA | 76 | 90 |
| 1388 | KVASYIAVAATLVYG | 81 | 95 |
| 1389 | IAVAATLVYGRIYAQ | 86 | 100 |
| 1390 | TLVYGRIYAQQRDMM | 91 | 105 |
| 1391 | RIYAQQRDMMQRGGE | 96 | 110 |
| 1392 | QRDMMQRGGELYVLT | 101 | 115 |
| 1393 | QRGGELYVLTLFALL | 106 | 120 |
| 1394 | LYVLTLFALLGQMVM | 111 | 125 |
| 1395 | LFALLGQMVMISAGN | 116 | 130 |
| 1396 | GQMVMISAGNLISIY | 121 | 135 |
| 1397 | ISAGNLISIYLGLEL | 126 | 140 |
| 1398 | LISIYLGLELMSLAL | 131 | 145 |
| 1399 | LGLELMSLALYALIA | 136 | 150 |
| 1400 | MSLALYALIALRRED | 141 | 155 |
| 1401 | YALIALRREDKVATE | 146 | 160 |
| 1402 | LRREDKVATEAAMKY | 151 | 165 |
| 1403 | KVATEAAMKYFVLGA | 156 | 170 |
| 1404 | AAMKYFVLGALASGF | 161 | 175 |
| 1405 | FVLGALASGFLLYGM | 166 | 180 |
| 1406 | LASGFLLYGMSMVYG | 171 | 185 |
| 1407 | LLYGMSMVYGATGHL | 176 | 190 |
| 1408 | SMVYGATGHLDLAKI | 181 | 195 |
| 1409 | ATGHLDLAKIAEVIA | 186 | 200 |
| 1410 | DLAKIAEVIASGQAK | 191 | 205 |
| 1411 | AEVIASGQAKQLPLV | 196 | 210 |
| 1412 | SGQAKQLPLVFGVVF | 201 | 215 |
| 1413 | QLPLVFGVVFLVSGL | 206 | 220 |
| 1414 | FGVVFLVSGLAFKLG | 211 | 225 |
| 1415 | LVSGLAFKLGAVPFH | 216 | 230 |
| 1416 | AFKLGAVPFHMWLPD | 221 | 235 |
| 1417 | AVPFHMWLPDVYQGS | 226 | 240 |
| 1418 | MWLPDVYQGSPTAVT | 231 | 245 |
| 1419 | VYQGSPTAVTLILGA | 236 | 250 |
| 1420 | PTAVTLILGAAPKLA | 241 | 255 |
| 1421 | LILGAAPKLAAFAIT | 246 | 260 |
| 1422 | APKLAAFAITLRLLV | 251 | 265 |
| 1423 | AFAITLRLLVDGLHG | 256 | 270 |
| 1424 | LRLLVDGLHGLAADW | 261 | 275 |
| 1425 | DGLHGLAADWQPMLM | 266 | 280 |
| 1426 | LAADWQPMLMILAVL | 271 | 285 |
| 1427 | QPMLMILAVLSLAIG | 276 | 290 |
| 1428 | ILAVLSLAIGNLTAI | 281 | 295 |
| 1429 | SLAIGNLTAIVQTNF | 286 | 300 |
| 1430 | NLTAIVQTNFKRMLA | 291 | 305 |
| 1431 | VQTNFKRMLAYSTIS | 296 | 310 |
| 1432 | KRMLAYSTISHTGFV | 301 | 315 |
| 1433 | YSTISHTGFVLLGLM | 306 | 320 |
| 1434 | HTGFVLLGLMAGVVD | 311 | 325 |
| 1435 | LLGLMAGVVDGKPDA | 316 | 330 |
| 1436 | AGVVDGKPDAAASAY | 321 | 335 |
| 1437 | GKPDAAASAYGAALF | 326 | 340 |
| 1438 | AASAYGAALFYMLTY | 331 | 345 |
| 1439 | GAALFYMLTYVLTTL | 336 | 350 |
| 1440 | YMLTYVLTTLGTFGI | 341 | 355 |
| 1441 | VLTTLGTFGIILLLA | 346 | 360 |
| 1442 | GTFGIILLLARQGFE | 351 | 365 |
| 1443 | ILLLARQGFECEQID | 356 | 370 |
| 1444 | RQGFECEQIDDLKGL | 361 | 375 |
| 1445 | CEQIDDLKGLNRRNP | 366 | 380 |
| 1446 | DLKGLNRRNPWHAAI | 371 | 385 |
| 1447 | NRRNPWHAAIVLLLM | 376 | 390 |
| 1448 | WHAAIVLLLMFSLAG | 381 | 395 |
| 1449 | VLLLMFSLAGIPPLV | 386 | 400 |
| 1450 | FSLAGIPPLVGFYAK | 391 | 405 |
| 1451 | IPPLVGFYAKLAVLQ | 396 | 410 |
| 1452 | GFYAKLAVLQALVEA | 401 | 415 |
| 1453 | LAVLQALVEAGHVAL | 406 | 420 |
| 1454 | ALVEAGHVALAVVAV | 411 | 425 |
| 1455 | GHVALAVVAVMFSLI | 416 | 430 |
| 1456 | AVVAVMFSLIGAFYY | 421 | 435 |
| 1457 | MFSLIGAFYYLRVVK | 426 | 440 |
| 1458 | GAFYYLRVVKVVYFD | 431 | 445 |
| 1459 | LRVVKVVYFDDPVDQ | 436 | 450 |
| 1460 | VVYFDDPVDQPAALA | 441 | 455 |
| 1461 | DPVDQPAALAVTAGQ | 446 | 460 |
| 1462 | PAALAVTAGQRSILS | 451 | 465 |
| 1463 | VTAGQRSILSLNGAL | 456 | 470 |
| 1464 | RSILSLNGALILVLG | 461 | 475 |
| 1465 | LNGALILVLGILPGG | 466 | 480 |
| 1466 | ILVLGILPGGLMALC | 471 | 485 |
| 1467 | ILPGGLMALCVQVIQ | 476 | 490 |
| 1468 | GLMALCVQVIQASLG | 480 | 494 |

| | |
|---|---|
| | Full Sequence |
| 2606 | MMQSHLDFALATPEILLLVLGLAILLIDAVSSHPERKTTF |
| | VLTLATLAALTVVSLLQWRDGVEGQTFNGLYVTDSLAHLL |
| | KVASYIAVAATLVYGRIYAQQRDMMQRGGELYVLTLFALL |
| | GQMVMISAGNLISIYLGLELMSLALYALIALRREDKVATE |
| | AAMKYFVLGALASGFLLYGMSMVYGATGHLDLAKIAEVIA |
| | SGQAKQLPLVFGVVFLVSGLAFKLGAVPFHMWLPDVYQGS |
| | PTAVTLILGAAPKLAAFAITLRLLVDGLHGLAADWQPMLM |
| | ILAVLSLAIGNLTAIVQTNFKRMLAYSTISHTGFVLLGLM |
| | AGVVDGKPDAAASAYGAALFYMLTYVLTTLGTFGIILLLA |
| | RQGFECEQIDDLKGLNRRNPWHAAIVLLLMFSLAGIPPLV |
| | GFYAKLAVLQALVEAGHVALAVVAVMFSLIGAFYYLRVVK |
| | VVYFDDPVDQPAALAVTAGQRSILSLNGALILVLGILPGG |
| | LMALCVQVIQASLG |

[0055] TABLE 11 PT(O) ANT 9—Overlapping peptides covering the entire sequence of NP_882154.1 thiol:disulfide interchange protein [B. pertussis Tohama I].

TABLE 11
PT(O) ANT 9-Overlapping peptides covering the entire sequence of NP_882154.1
thiol:disulfide interchange protein [B. pertussis Tohama I]

| SEQ | | | |
|---|---|---|---|
| ID | | | |
| NO | Peptide | Start | End |
| 1469 | MMQYGHASATGHGAS | 1 | 15 |
| 1470 | HASATGHGASATGRA | 6 | 20 |
| 1471 | GHGASATGRAAAAGR | 11 | 25 |
| 1472 | ATGRAAAAGRWLAWM | 16 | 30 |
| 1473 | AAAGRWLAWMLALAL | 21 | 35 |
| 1474 | WLAWMLALALVLFAR | 26 | 40 |
| 1475 | LALALVLFARPAAAL | 31 | 45 |
| 1476 | VLFARPAAALTEDDF | 36 | 50 |
| 1477 | PAAALTEDDFLPPEQ | 41 | 55 |
| 1478 | TEDDFLPPEQAFVFS | 46 | 60 |
| 1479 | LPPEQAFVFSAAMAD | 51 | 65 |
| 1480 | AFVFSAAMADPATLV | 56 | 70 |
| 1481 | AAMADPATLVLNYRI | 61 | 75 |
| 1482 | PATLVLNYRIAPEYY | 66 | 80 |
| 1483 | LNYRIAPEYYMYRER | 71 | 85 |
| 1484 | APEYYMYRERFGLSA | 76 | 90 |
| 1485 | MYRERFGLSASPAQA | 81 | 95 |
| 1486 | FGLSASPAQAVTLGE | 86 | 100 |
| 1487 | SPAQAVTLGEAAYPQ | 91 | 105 |
| 1488 | VTLGEAAYPQGKVKY | 96 | 110 |
| 1489 | AAYPQGKVKYDPTFD | 101 | 115 |
| 1490 | GKVKYDPTFDKDMEV | 106 | 120 |
| 1491 | DPTFDKDMEVFYGTV | 111 | 125 |
| 1492 | KDMEVFYGTVAVRVP | 116 | 130 |
| 1493 | FYGTVAVRVPLSQGN | 121 | 135 |
| 1494 | AVRVPLSQGNGQPFT | 126 | 140 |
| 1495 | LSQGNGQPFTLTVTS | 131 | 145 |
| 1496 | GQPFTLTVTSQGCAD | 136 | 150 |
| 1497 | LTVTSQGCADAGLCY | 141 | 155 |
| 1498 | QGCADAGLCYPPMDN | 146 | 160 |
| 1499 | AGLCYPPMDNTVQLT | 151 | 165 |
| 1500 | PPMDNTVQLTPVTGG | 156 | 170 |
| 1501 | TVQLTPVTGGYALAA | 161 | 175 |
| 1502 | PVTGGYALAAGTASA | 166 | 180 |
| 1503 | YALAAGTASAPQGGG | 171 | 185 |
| 1504 | GTASAPQGGGTFDSL | 176 | 190 |
| 1505 | PQGGGTFDSLLEAGD | 181 | 195 |
| 1506 | TFDSLLEAGDTRLAD | 186 | 200 |
| 1507 | LEAGDTRLADFIGGG | 191 | 205 |
| 1508 | TRLADFIGGGGWLKT | 196 | 210 |
| 1509 | FIGGGGWLKTAGVFL | 201 | 215 |
| 1510 | GWLKTAGVFLLLGML | 206 | 220 |
| 1511 | AGVFLLLGMLLAFTP | 211 | 225 |
| 1512 | LLGMLLAFTPCVLPM | 216 | 230 |
| 1513 | LAFTPCVLPMVPILS | 221 | 235 |
| 1514 | CVLPMVPILSSIVLG | 226 | 240 |
| 1515 | VPILSSIVLGGAQAQ | 231 | 245 |
| 1516 | SIVLGGAQAQRPSRW | 236 | 250 |
| 1517 | GAQAQRPSRWRGLGL | 241 | 255 |
| 1518 | RPSRWRGLGLAAAYV | 246 | 260 |
| 1519 | RGLGLAAAYVFGMSV | 251 | 265 |
| 1520 | AAAYVFGMSVVYTAL | 256 | 270 |
| 1521 | FGMSVVYTALGVAAG | 261 | 275 |
| 1522 | VYTALGVAAGLSGAG | 266 | 280 |
| 1523 | GVAAGLSGAGLAAWL | 271 | 285 |
| 1524 | LSGAGLAAWLQTPWI | 276 | 290 |
| 1525 | LAAWLQTPWILSLFA | 281 | 295 |
| 1526 | QTPWILSLFAILLAV | 286 | 300 |
| 1527 | LSLFAILLAVLALAM | 291 | 305 |
| 1528 | ILLAVLALAMFGAFT | 296 | 310 |
| 1529 | LALAMFGAFTFQMPA | 301 | 315 |
| 1530 | FGAFTFQMPAGLQAR | 306 | 320 |
| 1531 | FQMPAGLQARLSERS | 311 | 325 |
| 1532 | GLQARLSERSNRIPG | 316 | 330 |
| 1533 | LSERSNRIPGGRVTG | 321 | 335 |
| 1534 | NRIPGGRVTGALVMG | 326 | 340 |
| 1535 | GRVTGALVMGALSAL | 331 | 345 |
| 1536 | ALVMGALSALIVGPC | 336 | 350 |
| 1537 | ALSALIVGPCVAAPL | 341 | 355 |
| 1538 | IVGPCVAAPLAGALL | 346 | 360 |
| 1539 | VAAPLAGALLYISQT | 351 | 365 |
| 1540 | AGALLYISQTGDVIL | 356 | 370 |
| 1541 | YISQTGDVILGGAAL | 361 | 375 |
| 1542 | GDVILGGAALFAMAW | 366 | 380 |
| 1543 | GGAALFAMAWGMGIP | 371 | 385 |
| 1544 | FAMAWGMGIPLLLVG | 376 | 390 |
| 1545 | GMGIPLLLVGASAGT | 381 | 395 |
| 1546 | LLLVGASAGTLLPRT | 386 | 400 |
| 1547 | ASAGTLLPRTGPWME | 391 | 405 |
| 1548 | LLPRTGPWMESVKRV | 396 | 410 |
| 1549 | GPWMESVKRVFGMLL | 401 | 415 |
| 1550 | SVKRVFGMLLLGTAW | 406 | 420 |
| 1551 | FGMLLLGTAWWMLIP | 411 | 425 |
| 1552 | LGTAWWMLIPVVPTW | 416 | 430 |
| 1553 | WMLIPVVPTWVQMLG | 421 | 435 |
| 1554 | VVPTWVQMLGWSFLA | 426 | 440 |
| 1555 | VQMLGWSFLAVVGAV | 431 | 445 |
| 1556 | WSFLAVVGAVMLRAF | 436 | 450 |
| 1557 | VVGAVMLRAFDALPA | 441 | 455 |
| 1558 | MLRAFDALPAGSGAP | 446 | 460 |
| 1559 | DALPAGSGAPRMFAK | 451 | 465 |
| 1560 | GSGAPRMFAKGLGLL | 456 | 470 |
| 1561 | RMFAKGLGLLLALAG | 461 | 475 |
| 1562 | GLGLLLALAGAAWLI | 466 | 480 |
| 1563 | LALAGAAWLIGALSG | 471 | 485 |
| 1564 | AAWLIGALSGGRDVL | 476 | 490 |
| 1565 | GALSGGRDVLAPLSH | 481 | 495 |
| 1566 | GRDVLAPLSHLAARA | 486 | 500 |
| 1567 | APLSHLAARAPAGGA | 491 | 505 |
| 1568 | LAARAPAGGAVAAAG | 496 | 510 |
| 1569 | PAGGAVAAAGPAAVD | 501 | 515 |
| 1570 | VAAAGPAAVDKTRFV | 506 | 520 |
| 1571 | PAAVDKTRFVRVRSN | 511 | 525 |
| 1572 | KTRFVRVRSNAELDA | 516 | 530 |
| 1573 | RVRSNAELDALLARS | 521 | 535 |
| 1574 | AELDALLARSTQPVM | 526 | 540 |
| 1575 | LLARSTQPVMLDFYA | 531 | 545 |
| 1576 | TQPVMLDFYADWCVS | 536 | 550 |
| 1577 | LDFYADWCVSCREME | 541 | 555 |
| 1578 | DWCVSCREMEHFTFS | 546 | 560 |
| 1579 | CREMEHFTFSDPTVA | 551 | 565 |
| 1580 | HFTFSDPTVAARMSQ | 556 | 570 |
| 1581 | DPTVAARMSQMLLVQ | 561 | 575 |
| 1582 | ARMSQMLLVQADVTK | 566 | 580 |
| 1583 | MLLVQADVTKNNADD | 571 | 585 |
| 1584 | ADVTKNNADDRALLK | 576 | 590 |
| 1585 | NNADDRALLKRFRLF | 581 | 595 |
| 1586 | RALLKRFRLFGPPGI | 586 | 600 |
| 1587 | RFRLFGPPGIMFFEP | 591 | 605 |
| 1588 | GPPGIMFFEPGGKLI | 596 | 610 |
| 1589 | MFFEPGGKLIEDIRV | 601 | 615 |
| 1590 | GGKLIEDIRVVGFQD | 606 | 620 |
| 1591 | EDIRVVGFQDARRFA | 611 | 625 |
| 1592 | VGFQDARRFAGVLEQ | 616 | 630 |
| 1593 | ARRFAGVLEQVADRS | 621 | 635 |
| 1594 | GVLEQVADRSGAPGP | 626 | 640 |
| 1595 | VADRSGAPGPAQAGS | 631 | 645 |
| | Full Sequence | | |

| | |
|---|---|
| 2607 | MMQYGHASATGHGASATGRAAAAGRWLAWMLALALVLFARPAAALTEDDFLPPE |
| | QAFVFSAAMADPATLVLNYRIAPEYYMYRERFGLSASPAQAVTLGEAAYPQGKVKY |
| | DPTFDKDMEVFYGTVAVRVPLSQGNGQPFTLTVTSQGCADAGLCYPPMDNTVQLTP |
| | VTGGYALAAGTASAPQGGGTFDSLLEAGDTRLADFIGGGGWLKTAGVFLLLGMLLA |
| | FTPCVLPMVPILSSIVLGGAQAQRPSRWRGLGLAAAYVFGMSVVYTALGVAAGLSG |
| | AGLAAWLQTPWILSLFAILLAVLALAMFGAFTFQMPAGLQARLSERSNRIPGGRVTG |
| | ALVMGALSALIVGPCVAAPLAGALLYISQTGDVILGGAALFAMAWGMGIPLLLVGA |
| | SAGTLLPRTGPWMESVKRVFGMLLLGTAWWMLIPVVPTWVQMLGWSFLAVVGAV |
| | MLRAFDALPAGSGAPRMFAKGLGLLLALAGAAWLIGALSGGRDVLAPLSHLAARAP |
| | AGGAVAAAGPAAVDKTRFVRVRSNAELDALLARSTQPVMLDFYADWCVSCREME |
| | HFTFSDPTVAARMSQMLLVQADVTKNNADDRALLKRFRLFGPPGIMFFEPGGKLIED |
| | IRVVGFQDARRFAGVLEQVADRSGAPGPAQAGS |

[0056] TABLE 12 PT(O) ANT 10—Overlapping peptides covering the entire sequence of NP_879578.1 bifunctional hemolysin-adenylate cyclase [B. pertussis Tohama I].

TABLE 12
PT(O) ANT 10-Overlapping peptides covering the entire sequence of NP_879578.1
bifunctional hemolysin-adenylate cyclase [B. pertussis Tohama I]

| SEQ ID | | | |
|---|---|---|---|
| NO: | Peptide | Start | End |
| 1596 | MQQSHQAGYANAADR | 1 | 15 |
| 1597 | QAGYANAADRESGIP | 6 | 20 |
| 1598 | NAADRESGIPAAVLD | 11 | 25 |
| 1599 | ESGIPAAVLDGIKAV | 16 | 30 |
| 1600 | AAVLDGIKAVAKEKN | 21 | 35 |
| 1601 | GIKAVAKEKNATLMF | 26 | 40 |
| 1602 | AKEKNATLMFRLVNP | 31 | 45 |
| 1603 | ATLMFRLVNPHSTSL | 36 | 50 |
| 1604 | RLVNPHSTSLIAEGV | 41 | 55 |
| 1605 | HSTSLIAEGVATKGL | 46 | 60 |
| 1606 | IAEGVATKGLGVHAK | 51 | 65 |
| 1607 | ATKGLGVHAKSSDWG | 56 | 70 |
| 1608 | GVHAKSSDWGLQAGY | 61 | 75 |
| 1609 | SSDWGLQAGYIPVNP | 66 | 80 |
| 1610 | LQAGYIPVNPNLSKL | 71 | 85 |
| 1611 | IPVNPNLSKLFGRAP | 76 | 90 |
| 1612 | NLSKLFGRAPEVIAR | 81 | 95 |
| 1613 | FGRAPEVIARADNDV | 86 | 100 |
| 1614 | EVIARADNDVNSSLA | 91 | 105 |
| 1615 | ADNDVNSSLAHGHTA | 96 | 110 |
| 1616 | NSSLAHGHTAVDLTL | 101 | 115 |
| 1617 | HGHTAVDLTLSKERL | 106 | 120 |
| 1618 | VDLTLSKERLDYLRQ | 111 | 125 |
| 1619 | SKERLDYLRQAGLVT | 116 | 130 |
| 1620 | DYLRQAGLVTGMADG | 121 | 135 |
| 1621 | AGLVTGMADGVVASN | 126 | 140 |
| 1622 | GMADGVVASNHAGYE | 131 | 145 |
| 1623 | VVASNHAGYEQFEFR | 136 | 150 |
| 1624 | HAGYEQFEFRVKETS | 141 | 155 |
| 1625 | QFEFRVKETSDGRYA | 146 | 160 |
| 1626 | VKETSDGRYAVQYRR | 151 | 165 |
| 1627 | DGRYAVQYRRKGGDD | 156 | 170 |
| 1628 | VQYRRKGGDDFEAVK | 161 | 175 |
| 1629 | KGGDDFEAVKVIGNA | 166 | 180 |
| 1630 | FEAVKVIGNAAGIPL | 171 | 185 |
| 1631 | VIGNAAGIPLTADID | 176 | 190 |
| 1632 | AGIPLTADIDMFAIM | 181 | 195 |
| 1633 | TADIDMFAIMPHLSN | 186 | 200 |
| 1634 | MFAIMPHLSNFRDSA | 191 | 205 |
| 1635 | PHLSNFRDSARSSVT | 196 | 210 |
| 1636 | FRDSARSSVTSGDSV | 201 | 215 |
| 1637 | RSSVTSGDSVTDYLA | 206 | 220 |
| 1638 | SGDSVTDYLARTRRA | 211 | 225 |
| 1639 | TDYLARTRRAASEAT | 216 | 230 |
| 1640 | RTRRAASEATGGLDR | 221 | 235 |
| 1641 | ASEATGGLDRERIDL | 226 | 240 |
| 1642 | GGLDRERIDLLWKIA | 231 | 245 |
| 1643 | ERIDLLWKIARAGAR | 236 | 250 |
| 1644 | LWKIARAGARSAVGT | 241 | 255 |
| 1645 | RAGARSAVGTEARRQ | 246 | 260 |
| 1646 | SAVGTEARRQFRYDG | 251 | 265 |
| 1647 | EARRQFRYDGDMNIG | 256 | 270 |
| 1648 | FRYDGDMNIGVITDF | 261 | 275 |
| 1649 | DMNIGVITDFELEVR | 266 | 280 |
| 1650 | VITDFELEVRNALNR | 271 | 285 |
| 1651 | ELEVRNALNRRAHAV | 276 | 290 |
| 1652 | NALNRRAHAVGAQDV | 281 | 295 |
| 1653 | RAHAVGAQDVVQHGT | 286 | 300 |
| 1654 | GAQDVVQHGTEQNNP | 291 | 305 |
| 1655 | VQHGTEQNNPFPEAD | 296 | 310 |
| 1656 | EQNNPFPEADEKIFV | 301 | 315 |
| 1657 | FPEADEKIFVVSATG | 306 | 320 |
| 1658 | EKIFVVSATGESQML | 311 | 325 |
| 1659 | VSATGESQMLTRGQL | 316 | 330 |
| 1660 | ESQMLTRGQLKEYIG | 321 | 335 |
| 1661 | TRGQLKEYIGQQRGE | 326 | 340 |
| 1662 | KEYIGQQRGEGYVFY | 331 | 345 |
| 1663 | QQRGEGYVFYENRAY | 336 | 350 |
| 1664 | GYVFYENRAYGVAGK | 341 | 355 |
| 1665 | ENRAYGVAGKSLFDD | 346 | 360 |
| 1666 | GVAGKSLFDDGLGAA | 351 | 365 |
| 1667 | SLFDDGLGAAPGVPS | 356 | 370 |
| 1668 | GLGAAPGVPSGRSKF | 361 | 375 |
| 1669 | PGVPSGRSKFSPDVL | 366 | 380 |
| 1670 | GRSKFSPDVLETVPA | 371 | 385 |
| 1671 | SPDVLETVPASPGLR | 376 | 390 |
| 1672 | ETVPASPGLRRPSLG | 381 | 395 |
| 1673 | SPGLRRPSLGAVERQ | 386 | 400 |
| 1674 | RPSLGAVERQDSGYD | 391 | 405 |
| 1675 | AVERQDSGYDSLDGV | 396 | 410 |
| 1676 | DSGYDSLDGVGSRSF | 401 | 415 |
| 1677 | SLDGVGSRSFSLGEV | 406 | 420 |
| 1678 | GSRSFSLGEVSDMAA | 411 | 425 |
| 1679 | SLGEVSDMAAVEAAE | 416 | 430 |
| 1680 | SDMAAVEAAELEMTR | 421 | 435 |
| 1681 | VEAAELEMTRQVLHA | 426 | 440 |
| 1682 | LEMTRQVLHAGARQD | 431 | 445 |
| 1683 | QVLHAGARQDDAEPG | 436 | 450 |
| 1684 | GARQDDAEPGVSGAS | 441 | 455 |
| 1685 | DAEPGVSGASAHWGQ | 446 | 460 |
| 1686 | VSGASAHWGQRALQG | 451 | 465 |
| 1687 | AHWGQRALQGAQAVA | 456 | 470 |
| 1688 | RALQGAQAVAAAQRL | 461 | 475 |
| 1689 | AQAVAAAQRLVHAIA | 466 | 480 |
| 1690 | AAQRLVHAIALMTQF | 471 | 485 |
| 1691 | VHAIALMTQFGRAGS | 476 | 490 |
| 1692 | LMTQFGRAGSTNTPQ | 481 | 495 |
| 1693 | GRAGSTNTPQEAASL | 486 | 500 |
| 1694 | TNTPQEAASLSAAVF | 491 | 505 |
| 1695 | EAASLSAAVFGLGEA | 496 | 510 |
| 1696 | SAAVFGLGEASSAVA | 501 | 515 |
| 1697 | GLGEASSAVAETVSG | 506 | 520 |
| 1698 | SSAVAETVSGFFRGS | 511 | 525 |
| 1699 | ETVSGFFRGSSRWAG | 516 | 530 |
| 1700 | FFRGSSRWAGGFGVA | 521 | 535 |
| 1701 | SRWAGGFGVAGGAMA | 526 | 540 |
| 1702 | GFGVAGGAMALGGGI | 531 | 545 |
| 1703 | GGAMALGGGIAAAVG | 536 | 550 |
| 1704 | LGGGIAAAVGAGMSL | 541 | 555 |
| 1705 | AAAVGAGMSLTDDAP | 546 | 560 |
| 1706 | AGMSLTDDAPAGQKA | 551 | 565 |
| 1707 | TDDAPAGQKAAAGAE | 556 | 570 |
| 1708 | AGQKAAAGAEIALQL | 561 | 575 |
| 1709 | AAGAEIALQLTGGTV | 566 | 580 |
| 1710 | IALQLTGGTVELASS | 571 | 585 |
| 1711 | TGGTVELASSIALAL | 576 | 590 |
| 1712 | ELASSIALALAAARG | 581 | 595 |
| 1713 | IALALAAARGVTSGL | 586 | 600 |
| 1714 | AAARGVTSGLQVAGA | 591 | 605 |
| 1715 | VTSGLQVAGASAGAA | 596 | 610 |
| 1716 | QVAGASAGAAAGALA | 601 | 615 |
| 1717 | SAGAAAGALAAALSP | 606 | 620 |
| 1718 | AGALAAALSPMEIYG | 611 | 625 |
| 1719 | AALSPMEIYGLVQQS | 616 | 630 |
| 1720 | MEIYGLVQQSHYADQ | 621 | 635 |
| 1721 | LVQQSHYADQLDKLA | 626 | 640 |
| 1722 | HYADQLDKLAQESSA | 631 | 645 |
| 1723 | LDKLAQESSAYGYEG | 636 | 650 |
| 1724 | QESSAYGYEGDALLA | 641 | 655 |
| 1725 | YGYEGDALLAQLYRD | 646 | 660 |
| 1726 | DALLAQLYRDKTAAE | 651 | 665 |
| 1727 | QLYRDKTAAEGAVAG | 656 | 670 |
| 1728 | KTAAEGAVAGVSAVL | 661 | 675 |
| 1729 | GAVAGVSAVLSTVGA | 666 | 680 |
| 1730 | VSAVLSTVGAAVSIA | 671 | 685 |
| 1731 | STVGAAVSIAAAASV | 676 | 690 |
| 1732 | AVSIAAAASVVGAPV | 681 | 695 |
| 1733 | AAASVVGAPVAVVTS | 686 | 700 |
| 1734 | VGAPVAVVTSLLTGA | 691 | 705 |
| 1735 | AVVTSLLTGALNGIL | 696 | 710 |
| 1736 | LLTGALNGILRGVQQ | 701 | 715 |
| 1737 | LNGILRGVQQPIIEK | 706 | 720 |
| 1738 | RGVQQPIIEKLANDY | 711 | 725 |
| 1739 | PIIEKLANDYARKID | 716 | 730 |
| 1740 | LANDYARKIDELGGP | 721 | 735 |
| 1741 | ARKIDELGGPQAYFE | 726 | 740 |
| 1742 | ELGGPQAYFEKNLQA | 731 | 745 |
| 1743 | QAYFEKNLQARHEQL | 736 | 750 |
| 1744 | KNLQARHEQLANSDG | 741 | 755 |
| 1745 | RHEQLANSDGLRKML | 746 | 760 |
| 1746 | ANSDGLRKMLADLQA | 751 | 765 |
| 1747 | LRKMLADLQAGWNAS | 756 | 770 |
| 1748 | ADLQAGWNASSVIGV | 761 | 775 |
| 1749 | GWNASSVIGVQTTEI | 766 | 780 |
| 1750 | SVIGVQTTEISKSAL | 771 | 785 |
| 1751 | QTTEISKSALELAAI | 776 | 790 |
| 1752 | SKSALELAAITGNAD | 781 | 795 |
| 1753 | ELAAITGNADNLKSV | 786 | 800 |
| 1754 | TGNADNLKSVDVFVD | 791 | 805 |
| 1755 | NLKSVDVFVDRFVQG | 796 | 810 |
| 1756 | DVFVDRFVQGERVAG | 801 | 815 |
| 1757 | RFVQGERVAGQPVVL | 806 | 820 |
| 1758 | ERVAGQPVVLDVAAG | 811 | 825 |
| 1759 | QPVVLDVAAGGIDIA | 816 | 830 |
| 1760 | DVAAGGIDIASRKGE | 821 | 835 |
| 1761 | GIDIASRKGERPALT | 826 | 840 |
| 1762 | SRKGERPALTFITPL | 831 | 845 |
| 1763 | RPALTFITPLAAPGE | 836 | 850 |
| 1764 | FITPLAAPGEEQRRR | 841 | 855 |
| 1765 | AAPGEEQRRRTKTGK | 846 | 860 |
| 1766 | EQRRRTKTGKSEFTT | 851 | 865 |
| 1767 | TKTGKSEFTTFVEIV | 856 | 870 |
| 1768 | SEFTTFVEIVGKQDR | 861 | 875 |
| 1769 | FVEIVGKQDRWRIRD | 866 | 880 |
| 1770 | GKQDRWRIRDGAADT | 871 | 885 |
| 1771 | WRIRDGAADTTIDLA | 876 | 890 |
| 1772 | GAADTTIDLAKVVSQ | 881 | 895 |
| 1773 | TIDLAKVVSQLVDAN | 886 | 900 |
| 1774 | KVVSQLVDANGVLKH | 891 | 905 |
| 1775 | LVDANGVLKHSIKLD | 896 | 910 |
| 1776 | GVLKHSIKLDVIGGD | 901 | 915 |
| 1777 | SIKLDVIGGDGDDVV | 906 | 920 |
| 1778 | VIGGDGDDVVLANAS | 911 | 925 |
| 1779 | GDDVVLANASRIHYD | 916 | 930 |
| 1780 | LANASRIHYDGGAGT | 921 | 935 |
| 1781 | RIHYDGGAGTNTVSY | 926 | 940 |
| 1782 | GGAGTNTVSYAALGR | 931 | 945 |
| 1783 | NTVSYAALGRQDSIT | 936 | 950 |
| 1784 | AALGRQDSITVSADG | 941 | 955 |
| 1785 | QDSITVSADGERFNV | 946 | 960 |
| 1786 | VSADGERFNVRKQLN | 951 | 965 |
| 1787 | ERFNVRKQLNNANVY | 956 | 970 |
| 1788 | RKQLNNANVYREGVA | 961 | 975 |
| 1789 | NANVYREGVATQTTA | 966 | 980 |
| 1790 | REGVATQTTAYGKRT | 971 | 985 |
| 1791 | TQTTAYGKRTENVQY | 976 | 990 |
| 1792 | YGKRTENVQYRHVEL | 981 | 995 |
| 1793 | ENVQYRHVELARVGQ | 986 | 1000 |
| 1794 | RHVELARVGQLVEVD | 991 | 1005 |
| 1795 | ARVGQLVEVDTLEHV | 996 | 1010 |
| 1796 | LVEVDTLEHVQHIIG | 1001 | 1015 |
| 1797 | TLEHVQHIIGGAGND | 1006 | 1020 |
| 1798 | QHIIGGAGNDSITGN | 1011 | 1025 |
| 1799 | GAGNDSITGNAHDNF | 1016 | 1030 |
| 1800 | SITGNAHDNFLAGGS | 1021 | 1035 |
| 1801 | AHDNFLAGGSGDDRL | 1026 | 1040 |
| 1802 | LAGGSGDDRLDGGAG | 1031 | 1045 |
| 1803 | GDDRLDGGAGNDTLV | 1036 | 1050 |
| 1804 | DGGAGNDTLVGGEGQ | 1041 | 1055 |
| 1805 | NDTLVGGEGQNTVIG | 1046 | 1060 |
| 1806 | GGEGQNTVIGGAGDD | 1051 | 1065 |
| 1807 | NTVIGGAGDDVFLQD | 1056 | 1070 |
| 1808 | GAGDDVFLQDLGVWS | 1061 | 1075 |
| 1809 | VFLQDLGVWSNQLDG | 1066 | 1080 |
| 1810 | LGVWSNQLDGGAGVD | 1071 | 1085 |
| 1811 | NQLDGGAGVDTVKYN | 1076 | 1090 |
| 1812 | GAGVDTVKYNVHQPS | 1081 | 1095 |
| 1813 | TVKYNVHQPSEERLE | 1086 | 1100 |
| 1814 | VHQPSEERLERMGDT | 1091 | 1105 |
| 1815 | EERLERMGDTGIHAD | 1096 | 1110 |
| 1816 | RMGDTGIHADLQKGT | 1101 | 1115 |
| 1817 | GIHADLQKGTVEKWP | 1106 | 1120 |
| 1818 | LQKGTVEKWPALNLF | 1111 | 1125 |
| 1819 | VEKWPALNLFSVDHV | 1116 | 1130 |
| 1820 | ALNLFSVDHVKNIEN | 1121 | 1135 |
| 1821 | SVDHVKNIENLHGSR | 1126 | 1140 |
| 1822 | KNIENLHGSRLNDRI | 1131 | 1145 |
| 1823 | LHGSRLNDRIAGDDQ | 1136 | 1150 |
| 1824 | LNDRIAGDDQDNELW | 1141 | 1155 |
| 1825 | AGDDQDNELWGHDGN | 1146 | 1160 |
| 1826 | DNELWGHDGNDTIRG | 1151 | 1165 |
| 1827 | GHDGNDTIRGRGGDD | 1156 | 1170 |
| 1828 | DTIRGRGGDDILRGG | 1161 | 1175 |
| 1829 | RGGDDILRGGLGLDT | 1166 | 1180 |
| 1830 | ILRGGLGLDTLYGED | 1171 | 1185 |
| 1831 | LGLDTLYGEDGNDIF | 1176 | 1190 |
| 1832 | LYGEDGNDIFLQDDE | 1181 | 1195 |
| 1833 | GNDIFLQDDETVSDD | 1186 | 1200 |
| 1834 | LQDDETVSDDIDGGA | 1191 | 1205 |
| 1835 | TVSDDIDGGAGLDTV | 1196 | 1210 |
| 1836 | IDGGAGLDTVDYSAM | 1201 | 1215 |
| 1837 | GLDTVDYSAMIHPGR | 1206 | 1220 |
| 1838 | DYSAMIHPGRIVAPH | 1211 | 1225 |
| 1839 | IHPGRIVAPHEYGFG | 1216 | 1230 |
| 1840 | IVAPHEYGFGIEADL | 1221 | 1235 |
| 1841 | EYGFGIEADLSREWV | 1226 | 1240 |
| 1842 | IEADLSREWVRKASA | 1231 | 1245 |
| 1843 | SREWVRKASALGVDY | 1236 | 1250 |
| 1844 | RKASALGVDYYDNVR | 1241 | 1255 |
| 1845 | LGVDYYDNVRNVENV | 1246 | 1260 |
| 1846 | YDNVRNVENVIGTSM | 1251 | 1265 |
| 1847 | NVENVIGTSMKDVLI | 1256 | 1270 |
| 1848 | IGTSMKDVLIGDAQA | 1261 | 1275 |
| 1849 | KDVLIGDAQANTLMG | 1266 | 1280 |
| 1850 | GDAQANTLMGQGGDD | 1271 | 1285 |
| 1851 | NTLMGQGGDDTVRGG | 1276 | 1290 |
| 1852 | QGGDDTVRGGDGDDL | 1281 | 1295 |
| 1853 | TVRGGDGDDLLFGGD | 1286 | 1300 |
| 1854 | DGDDLLFGGDGNDML | 1291 | 1305 |
| 1855 | LFGGDGNDMLYGDAG | 1296 | 1310 |
| 1856 | GNDMLYGDAGNDTLY | 1301 | 1315 |
| 1857 | YGDAGNDTLYGGLGD | 1306 | 1320 |
| 1858 | NDTLYGGLGDDTLEG | 1311 | 1325 |
| 1859 | GGLGDDTLEGGAGND | 1316 | 1330 |
| 1860 | DTLEGGAGNDWFGQT | 1321 | 1335 |
| 1861 | GAGNDWFGQTQAREH | 1326 | 1340 |
| 1862 | WFGQTQAREHDVLRG | 1331 | 1345 |
| 1863 | QAREHDVLRGGDGVD | 1336 | 1350 |
| 1864 | DVLRGGDGVDTVDYS | 1341 | 1355 |
| 1865 | GDGVDTVDYSQTGAH | 1346 | 1360 |
| 1866 | TVDYSQTGAHAGIAA | 1351 | 1365 |
| 1867 | QTGAHAGIAAGRIGL | 1356 | 1370 |
| 1868 | AGIAAGRIGLGILAD | 1361 | 1375 |
| 1869 | GRIGLGILADLGAGR | 1366 | 1380 |
| 1870 | GILADLGAGRVDKLG | 1371 | 1385 |
| 1871 | LGAGRVDKLGEAGSS | 1376 | 1390 |
| 1872 | VDKLGEAGSSAYDTV | 1381 | 1395 |
| 1873 | EAGSSAYDTVSGIEN | 1386 | 1400 |
| 1874 | AYDTVSGIENVVGTE | 1391 | 1405 |
| 1875 | SGIENVVGTELADRI | 1396 | 1410 |
| 1876 | VVGTELADRITGDAQ | 1401 | 1415 |
| 1877 | LADRITGDAQANVLR | 1406 | 1420 |
| 1878 | TGDAQANVLRGAGGA | 1411 | 1425 |
| 1879 | ANVLRGAGGADVLAG | 1416 | 1430 |
| 1880 | GAGGADVLAGGEGDD | 1421 | 1435 |
| 1881 | DVLAGGEGDDVLLGG | 1426 | 1440 |
| 1882 | GEGDDVLLGGDGDDQ | 1431 | 1445 |
| 1883 | VLLGGDGDDQLSGDA | 1436 | 1450 |
| 1884 | DGDDQLSGDAGRDRL | 1441 | 1455 |
| 1885 | LSGDAGRDRLYGEAG | 1446 | 1460 |
| 1886 | GRDRLYGEAGDDWFF | 1451 | 1465 |
| 1887 | YGEAGDDWFFQDAAN | 1456 | 1470 |
| 1888 | DDWFFQDAANAGNLL | 1461 | 1475 |
| 1889 | QDAANAGNLLDGGDG | 1466 | 1480 |
| 1890 | AGNLLDGGDGRDTVD | 1471 | 1485 |
| 1891 | DGGDGRDTVDFSGPG | 1476 | 1490 |
| 1892 | RDTVDFSGPGRGLDA | 1481 | 1495 |
| 1893 | FSGPGRGLDAGAKGV | 1486 | 1500 |
| 1894 | RGLDAGAKGVFLSLG | 1491 | 1505 |
| 1895 | GAKGVFLSLGKGFAS | 1496 | 1510 |
| 1896 | FLSLGKGFASLMDEP | 1501 | 1515 |
| 1897 | KGFASLMDEPETSNV | 1506 | 1520 |
| 1898 | LMDEPETSNVLRNIE | 1511 | 1525 |
| 1899 | ETSNVLRNIENAVGS | 1516 | 1530 |
| 1900 | LRNIENAVGSARDDV | 1521 | 1535 |
| 1901 | NAVGSARDDVLIGDA | 1526 | 1540 |
| 1902 | ARDDVLIGDAGANVL | 1531 | 1545 |
| 1903 | LIGDAGANVLNGLAG | 1536 | 1550 |
| 1904 | GANVLNGLAGNDVLS | 1541 | 1555 |
| 1905 | NGLAGNDVLSGGAGD | 1546 | 1560 |
| 1906 | NDVLSGGAGDDVLLG | 1551 | 1565 |
| 1907 | GGAGDDVLLGDEGSD | 1556 | 1570 |
| 1908 | DVLLGDEGSDLLSGD | 1561 | 1575 |
| 1909 | DEGSDLLSGDAGNDD | 1566 | 1580 |
| 1910 | LLSGDAGNDDLFGGQ | 1571 | 1585 |
| 1911 | AGNDDLFGGQGDDTY | 1576 | 1590 |
| 1912 | LFGGQGDDTYLFGVG | 1581 | 1595 |
| 1913 | GDDTYLFGVGYGHDT | 1586 | 1600 |
| 1914 | LFGVGYGHDTIYESG | 1591 | 1605 |
| 1915 | YGHDTIYESGGGHDT | 1596 | 1610 |
| 1916 | IYESGGGHDTIRINA | 1601 | 1615 |
| 1917 | GGHDTIRINAGADQL | 1606 | 1620 |
| 1918 | IRINAGADQLWFARQ | 1611 | 1625 |
| 1919 | GADQLWFARQGNDLE | 1616 | 1630 |
| 1920 | WFARQGNDLEIRILG | 1621 | 1635 |
| 1921 | GNDLEIRILGTDDAL | 1626 | 1640 |
| 1922 | IRILGTDDALTVHDW | 1631 | 1645 |
| 1923 | TDDALTVHDWYRDAD | 1636 | 1650 |
| 1924 | TVHDWYRDADHRVEI | 1641 | 1655 |
| 1925 | YRDADHRVEIIHAAN | 1646 | 1660 |
| 1926 | HRVEIIHAANQAVDQ | 1651 | 1665 |
| 1927 | IHAANQAVDQAGIEK | 1656 | 1670 |
| 1928 | QAVDQAGIEKLVEAM | 1661 | 1675 |
| 1929 | AGIEKLVEAMAQYPD | 1666 | 1680 |
| 1930 | LVEAMAQYPDPGAAA | 1671 | 1685 |
| 1931 | AQYPDPGAAAAAPPA | 1676 | 1690 |
| 1932 | PGAAAAAPPAARVPD | 1681 | 1695 |
| 1933 | AAPPAARVPDTLMQS | 1686 | 1700 |
| 1934 | ARVPDTLMQSLAVNW | 1691 | 1705 |
| 1935 | RVPDTLMQSLAVNWR | 1692 | 1706 |
| | Full Sequence | | |

| | |
|---|---|
| 2608 | MQQSHQAGYANAADRESGIPAAVLDGIKAVAKEKNATLMFRLVNPHSTSLIAEGV |
| | ATKGLGVHAKSSDWGLQAGYIPVNPNLSKLFGRAPEVIARADNDVNSSLAHGHTA |
| | VDLTLSKERLDYLRQAGLVTGMADGVVASNHAGYEQFEFRVKETSDGRYAVQYR |
| | RKGGDDFEAVKVIGNAAGIPLTADIDMFAIMPHLSNFRDSARSSVTSGDSVTDYLA |
| | RTRRAASEATGGLDRERIDLLWKIARAGARSAVGTEARRQFRYDGDMNIGVITDFE |
| | LEVRNALNRRAHAVGAQDVVQHGTEQNNPFPEADEKIFVVSATGESQMLTRGQLK |
| | EYIGQQRGEGYVFYENRAYGVAGKSLFDDGLGAAPGVPSGRSKFSPDVLETVPASP |
| | GLRRPSLGAVERQDSGYDSLDGVGSRSFSLGEVSDMAAVEAAELEMTRQVLHAGA |
| | RQDDAEPGVSGASAHWGQRALQGAQAVAAAQRLVHAIALMTQFGRAGSTNTPQE |
| | AASLSAAVFGLGEASSAVAETVSGFFRGSSRWAGGFGVAGGAMALGGGIAAAVG |
| | AGMSLTDDAPAGQKAAAGAEIALQLTGGTVELASSIALALAAARGVTSGLQVAGA |
| | SAGAAAGALAAALSPMEIYGLVQQSHYADQLDKLAQESSAYGYEGDALLAQLYR |
| | DKTAAEGAVAGVSAVLSTVGAAVSIAAAASVVGAPVAVVTSLLTGALNGILRGVQ |
| | QPIIEKLANDYARKIDELGGPQAYFEKNLQARHEQLANSDGLRKMLADLQAGWNA |
| | SSVIGVQTTEISKSALELAAITGNADNLKSVDVFVDRFVQGERVAGQPVVLDVAAG |
| | GIDIASRKGERPALTFITPLAAPGEEQRRRTKTGKSEFTTFVEIVGKQDRWRIRDGAA |
| | DTTIDLAKVVSQLVDANGVLKHSIKLDVIGGDGDDVVLANASRIHYDGGAGTNTV |
| | SYAALGRQDSITVSADGERFNVRKQLNNANVYREGVATQTTAYGKRTENVQYRH |
| | VELARVGQLVEVDTLEHVQHIIGGAGNDSITGNAHDNFLAGGSGDDRLDGGAGND |
| | TLVGGEGQNTVIGGAGDDVFLQDLGVWSNQLDGGAGVDTVKYNVHQPSEERLER |
| | MGDTGIHADLQKGTVEKWPALNLFSVDHVKNIENLHGSRLNDRIAGDDQDNELW |
| | GHDGNDTIRGRGGDDILRGGLGLDTLYGEDGNDIFLQDDETVSDDIDGGAGLDTVD |
| | YSAMIHPGRIVAPHEYGFGIEADLSREWVRKASALGVDYYDNVRNVENVIGTSMK |
| | DVLIGDAQANTLMGQGGDDTVRGGDGDDLLFGGDGNDMLYGDAGNDTLYGGLG |
| | DDTLEGGAGNDWFGQTQAREHDVLRGGDGVDTVDYSQTGAHAGIAAGRIGLGIL |
| | ADLGAGRVDKLGEAGSSAYDTVSGIENVVGTELADRITGDAQANVLRGAGGADVL |
| | AGGEGDDVLLGGDGDDQLSGDAGRDRLYGEAGDDWFFQDAANAGNLLDGGDGR |
| | DTVDFSGPGRGLDAGAKGVFLSLGKGFASLMDEPETSNVLRNIENAVGSARDDVLI |
| | GDAGANVLNGLAGNDVLSGGAGDDVLLGDEGSDLLSGDAGNDDLFGGQGDDTY |
| | LFGVGYGHDTIYESGGGHDTIRINAGADQLWFARQGNDLEIRILGTDDALTVHDWY |
| | RDADHRVEIIHAANQAVDQAGIEKLVEAMAQYPDPGAAAAAPPAARVPDTLMQSL |
| | AVNWR |

[0057] TABLE 13 PT(O) ANT 11—Overlapping peptides covering the entire sequence of NP_882012.1 serum resistance protein [B. pertussis Tohama I].

TABLE 13
PT(O) ANT 11-Overlapping peptides covering the entire sequence of NP_882012.1
serum resistance protein [B. pertussis Tohama I]

| SEQ ID | | | |
|---|---|---|---|
| NO: | Peptide | Start | End |
| 1936 | MRLPRQIRLPHLRDI | 1 | 15 |
| 1937 | QIRLPHLRDIGALLT | 6 | 20 |
| 1938 | HLRDIGALLTDSARE | 11 | 25 |
| 1939 | GALLTDSAREWSRHR | 16 | 30 |
| 1940 | DSAREWSRHRASSKG | 21 | 35 |
| 1941 | WSRHRASSKGAALSL | 26 | 40 |
| 1942 | ASSKGAALSLYMVFS | 31 | 45 |
| 1943 | AALSLYMVFSLAPML | 36 | 50 |
| 1944 | YMVFSLAPMLILVIA | 41 | 55 |
| 1945 | LAPMLILVIAVAGAF | 46 | 60 |
| 1946 | ILVIAVAGAFFGEEA | 51 | 65 |
| 1947 | VAGAFFGEEAVRSEL | 56 | 70 |
| 1948 | FGEEAVRSELFSQVR | 61 | 75 |
| 1949 | VRSELFSQVRDLTGE | 66 | 80 |
| 1950 | FSQVRDLTGERGAEV | 71 | 85 |
| 1951 | DLTGERGAEVIQTVL | 76 | 90 |
| 1952 | RGAEVIQTVLASAHE | 81 | 95 |
| 1953 | IQTVLASAHESGSGW | 86 | 100 |
| 1954 | ASAHESGSGWLAALL | 91 | 105 |
| 1955 | SGSGWLAALLSICVL | 96 | 110 |
| 1956 | LAALLSICVLVFSAT | 101 | 115 |
| 1957 | SICVLVFSATTAFAE | 106 | 120 |
| 1958 | VFSATTAFAELKASL | 111 | 125 |
| 1959 | TAFAELKASLDELWD | 116 | 130 |
| 1960 | LKASLDELWDVKEDK | 121 | 135 |
| 1961 | DELWDVKEDKSGLQG | 126 | 140 |
| 1962 | VKEDKSGLQGLVRSR | 131 | 145 |
| 1963 | SGLQGLVRSRMLSFG | 136 | 150 |
| 1964 | LVRSRMLSFGLVLVL | 141 | 155 |
| 1965 | MLSFGLVLVLALFLL | 146 | 160 |
| 1966 | LVLVLALFLLLSLTL | 151 | 165 |
| 1967 | ALFLLLSLTLNAALG | 156 | 170 |
| 1968 | LSLTLNAALGAAKGY | 161 | 175 |
| 1969 | NAALGAAKGYYGDLW | 166 | 180 |
| 1970 | AAKGYYGDLWSTSAF | 171 | 185 |
| 1971 | YGDLWSTSAFAMAAD | 176 | 190 |
| 1972 | STSAFAMAADWLSNL | 181 | 195 |
| 1973 | AMAADWLSNLFSFAV | 186 | 200 |
| 1974 | WLSNLFSFAVVTALF | 191 | 205 |
| 1975 | FSFAVVTALFAVVYK | 196 | 210 |
| 1976 | VTALFAVVYKLLPSK | 201 | 215 |
| 1977 | AVVYKLLPSKRIPWL | 206 | 220 |
| 1978 | LLPSKRIPWLDVIPG | 211 | 225 |
| 1979 | RIPWLDVIPGAIVTA | 216 | 230 |
| 1980 | DVIPGAIVTAALFLA | 221 | 235 |
| 1981 | AIVTAALFLAGKWGI | 226 | 240 |
| 1982 | ALFLAGKWGIGLYLG | 231 | 245 |
| 1983 | GKWGIGLYLGRGAAV | 236 | 250 |
| 1984 | GLYLGRGAAVSAYGA | 241 | 255 |
| 1985 | RGAAVSAYGAAGSLI | 246 | 260 |
| 1986 | SAYGAAGSLIALLLW | 251 | 265 |
| 1987 | AGSLIALLLWIYYSA | 256 | 270 |
| 1988 | ALLLWIYYSAQIFFF | 261 | 275 |
| 1989 | IYYSAQIFFFGAVFT | 266 | 280 |
| 1990 | QIFFFGAVFTRQFAE | 271 | 285 |
| 1991 | GAVFTRQFAERFGSL | 276 | 290 |
| 1992 | RQFAERFGSLRRAAP | 281 | 295 |
| 1993 | QFAERFGSLRRAAPA | 282 | 296 |
| | Full Sequence | | |

| | |
|---|---|
| 2609 | MRLPRQIRLPHLRDIGALLTDSAREWSRHRASSKGAALSLYMVFSLAPMLILVIAVA |
| | GAFFGEEAVRSELFSQVRDLTGERGAEVIQTVLASAHESGSGWLAALLSICVLVFSA |
| | TTAFAELKASLDELWDVKEDKSGLQGLVRSRMLSFGLVLVLALFLLLSLTLNAALG |
| | AAKGYYGDLWSTSAFAMAADWLSNLFSFAVVTALFAVVYKLLPSKRIPWLDVIPG |
| | AIVTAALFLAGKWGIGLYLGRGAAVSAYGAAGSLIALLLWIYYSAQIFFFGAVFTR |
| | QFAERFGSLRRAAPA |

[0058] TABLE 14 PT(O) ANT 12—Overlapping peptides covering the entire sequence of NP_880865.1 inner membrane protein [B. pertussis Tohama I].

TABLE 14
PT(O) ANT 12-Overlapping peptides covering the entire sequence of NP_880865.1
inner membrane protein [B. pertussis Tohama I]

| SEQ ID | | | |
|---|---|---|---|
| NO: | Peptide | Start | End |
| 1994 | MKNESSTTTADLEQL | 1 | 15 |
| 1995 | STTTADLEQLVAEAD | 6 | 20 |
| 1996 | DLEQLVAEADRGGRH | 11 | 25 |
| 1997 | VAEADRGGRHAGGVA | 16 | 30 |
| 1998 | RGGRHAGGVAGATLA | 21 | 35 |
| 1999 | AGGVAGATLAAGALV | 26 | 40 |
| 2000 | GATLAAGALVWSLFQ | 31 | 45 |
| 2001 | AGALVWSLFQLWYAS | 36 | 50 |
| 2002 | WSLFQLWYASPLPFS | 41 | 55 |
| 2003 | LWYASPLPFSLHWGV | 46 | 60 |
| 2004 | PLPFSLHWGVENDTE | 51 | 65 |
| 2005 | LHWGVENDTEARALH | 56 | 70 |
| 2006 | FNDTEARALHLGTAM | 61 | 75 |
| 2007 | ARALHLGTAMFLGYL | 66 | 80 |
| 2008 | LGTAMFLGYLAYPAT | 71 | 85 |
| 2009 | FLGYLAYPATKRSAR | 76 | 90 |
| 2010 | AYPATKRSARDRMPW | 81 | 95 |
| 2011 | KRSARDRMPWYDWVL | 86 | 100 |
| 2012 | DRMPWYDWVLALAAG | 91 | 105 |
| 2013 | YDWVLALAAGFCGAY | 96 | 110 |
| 2014 | ALAAGFCGAYLYLFY | 101 | 115 |
| 2015 | FCGAYLYLFYNELAI | 106 | 120 |
| 2016 | LYLFYNELAIRPGQP | 111 | 125 |
| 2017 | NELAIRPGQPTSMDV | 116 | 130 |
| 2018 | RPGQPTSMDVATAVA | 121 | 135 |
| 2019 | TSMDVATAVAGLLLL | 126 | 140 |
| 2020 | ATAVAGLLLLLEVTR | 131 | 145 |
| 2021 | GLLLLLEVTRRALGL | 136 | 150 |
| 2022 | LEVTRRALGLPMTVL | 141 | 155 |
| 2023 | RALGLPMTVLGAVFV | 146 | 160 |
| 2024 | PMTVLGAVFVLYALA | 151 | 165 |
| 2025 | GAVFVLYALAGPWLP | 156 | 170 |
| 2026 | LYALAGPWLPDVLAH | 161 | 175 |
| 2027 | GPWLPDVLAHRGASI | 166 | 180 |
| 2028 | DVLAHRGASIERLMS | 171 | 185 |
| 2029 | RGASIERLMSHMWLT | 176 | 190 |
| 2030 | ERLMSHMWLTTEGVY | 181 | 195 |
| 2031 | HMWLTTEGVYGVALG | 186 | 200 |
| 2032 | TEGVYGVALGVSVSY | 191 | 205 |
| 2033 | GVALGVSVSYIFIFV | 196 | 210 |
| 2034 | VSVSYIFIFVLLGSL | 201 | 215 |
| 2035 | IFIFVLLGSLLDKCG | 206 | 220 |
| 2036 | LLGSLLDKCGAGNYM | 211 | 225 |
| 2037 | LDKCGAGNYMMQVSF | 216 | 230 |
| 2038 | AGNYMMQVSFALLGH | 221 | 235 |
| 2039 | MQVSFALLGHLRGGP | 226 | 240 |
| 2040 | ALLGHLRGGPAKVAV | 231 | 245 |
| 2041 | LRGGPAKVAVVSSAV | 236 | 250 |
| 2042 | AKVAVVSSAVNGLVS | 241 | 255 |
| 2043 | VSSAVNGLVSASSVA | 246 | 260 |
| 2044 | NGLVSASSVANVVTG | 251 | 265 |
| 2045 | ASSVANVVTGGIFTI | 256 | 270 |
| 2046 | NVVTGGIFTIPLMKK | 261 | 275 |
| 2047 | GIFTIPLMKKAGYGG | 266 | 280 |
| 2048 | PLMKKAGYGGVRAGA | 271 | 285 |
| 2049 | AGYGGVRAGAIETAS | 276 | 290 |
| 2050 | VRAGAIETASSVNGQ | 281 | 295 |
| 2051 | IETASSVNGQIMPPV | 286 | 300 |
| 2052 | SVNGQIMPPVMGAAA | 291 | 305 |
| 2053 | IMPPVMGAAAFLMIE | 296 | 310 |
| 2054 | MGAAAFLMIEYVGIP | 301 | 315 |
| 2055 | FLMIEYVGIPYTDII | 306 | 320 |
| 2056 | YVGIPYTDIIRHAIL | 311 | 325 |
| 2057 | YTDIIRHAILPASIS | 316 | 330 |
| 2058 | RHAILPASISYIALF | 321 | 335 |
| 2059 | PASISYIALFYSVHL | 326 | 340 |
| 2060 | YIALFYSVHLEALKL | 331 | 345 |
| 2061 | YSVHLEALKLGIEPM | 336 | 350 |
| 2062 | EALKLGIEPMMAAGK | 341 | 355 |
| 2063 | GIEPMMAAGKPRTPL | 346 | 360 |
| 2064 | MAAGKPRTPLQKLAG | 351 | 365 |
| 2065 | PRTPLQKLAGWGMGI | 356 | 370 |
| 2066 | QKLAGWGMGISGTLI | 361 | 375 |
| 2067 | WGMGISGTLIAMGLV | 366 | 380 |
| 2068 | SGTLIAMGLVYWIGV | 371 | 385 |
| 2069 | AMGLVYWIGVGVQAV | 376 | 390 |
| 2070 | YWIGVGVQAVAGAAA | 381 | 395 |
| 2071 | GVQAVAGAAAIWILL | 386 | 400 |
| 2072 | AGAAAIWILLAMLVA | 391 | 405 |
| 2073 | IWILLAMLVALNIWL | 396 | 410 |
| 2074 | AMLVALNIWLLRVAA | 401 | 415 |
| 2075 | LNIWLLRVAARHPDL | 406 | 420 |
| 2076 | LRVAARHPDLPTEID | 411 | 425 |
| 2077 | RHPDLPTEIDVNHPV | 416 | 430 |
| 2078 | PTEIDVNHPVRPEPW | 421 | 435 |
| 2079 | VNHPVRPEPWPTVRA | 426 | 440 |
| 2080 | RPEPWPTVRAGLHFL | 431 | 445 |
| 2081 | PTVRAGLHFLIPIGI | 436 | 450 |
| 2082 | GLHFLIPIGILVWCL | 441 | 455 |
| 2083 | IPIGILVWCLSVEEL | 446 | 460 |
| 2084 | LVWCLSVEELSAGLS | 451 | 465 |
| 2085 | SVEELSAGLSAFWAA | 456 | 470 |
| 2086 | SAGLSAFWAAAATLL | 461 | 475 |
| 2087 | AFWAAAATLLQMVTQ | 466 | 480 |
| 2088 | AATLLQMVTQRPLTA | 471 | 485 |
| 2089 | QMVTQRPLTAWFRGQ | 476 | 490 |
| 2090 | RPLTAWFRGQAIAPA | 481 | 495 |
| 2091 | WFRGQAIAPAALLGW | 486 | 500 |
| 2092 | AIAPAALLGWRDAIG | 491 | 505 |
| 2093 | ALLGWRDAIGGLQDD | 496 | 510 |
| 2094 | RDAIGGLQDDARNMI | 501 | 515 |
| 2095 | GLQDDARNMIGIAIA | 506 | 520 |
| 2096 | ARNMIGIAIACGTAG | 511 | 525 |
| 2097 | GIAIACGTAGLIVGA | 516 | 530 |
| 2098 | CGTAGLIVGAITLTG | 521 | 535 |
| 2099 | LIVGAITLTGLGLRM | 526 | 540 |
| 2100 | ITLTGLGLRMTAFVE | 531 | 545 |
| 2101 | LGLRMTAFVELVSMG | 536 | 550 |
| 2102 | TAFVELVSMGNVLLM | 541 | 555 |
| 2103 | LVSMGNVLLMLIFTA | 546 | 560 |
| 2104 | NVLLMLIFTAIVCLI | 551 | 565 |
| 2105 | LIFTAIVCLILGLGM | 556 | 570 |
| 2106 | IVCLILGLGMPTTAN | 561 | 575 |
| 2107 | LGLGMPTTANYILMA | 566 | 580 |
| 2108 | PTTANYILMATLMAP | 571 | 585 |
| 2109 | YILMATLMAPVVVEL | 576 | 590 |
| 2110 | TLMAPVVVELGAQNG | 581 | 595 |
| 2111 | VVVELGAQNGLIIPL | 586 | 600 |
| 2112 | GAQNGLIIPLIAVHM | 591 | 605 |
| 2113 | LIIPLIAVHMFVFYY | 596 | 610 |
| 2114 | IAVHMFVFYYGIMAD | 601 | 615 |
| 2115 | FVFYYGIMADITPPV | 606 | 620 |
| 2116 | GIMADITPPVGLATF | 611 | 625 |
| 2117 | ITPPVGLATFAAAAI | 616 | 630 |
| 2118 | GLATFAAAAISGADP | 621 | 635 |
| 2119 | AAAAISGADPIKTGV | 626 | 640 |
| 2120 | SGADPIKTGVQGVTY | 631 | 645 |
| 2121 | IKTGVQGVTYALRTA | 636 | 650 |
| 2122 | QGVTYALRTAVLPFM | 641 | 655 |
| 2123 | ALRTAVLPFMFVFNP | 646 | 660 |
| 2124 | VLPFMFVFNPLLLLI | 651 | 665 |
| 2125 | FVFNPLLLLIDVNSW | 656 | 670 |
| 2126 | LLLLIDVNSWTELIL | 661 | 675 |
| 2127 | DVNSWTELILVAGSA | 666 | 680 |
| 2128 | TELILVAGSATLASL | 671 | 685 |
| 2129 | VAGSATLASLTFASA | 676 | 690 |
| 2130 | TLASLTFASATLGWF | 681 | 695 |
| 2131 | TFASATLGWFRVRCT | 686 | 700 |
| 2132 | TLGWFRVRCTMLEIV | 691 | 705 |
| 2133 | RVRCTMLEIVVLLAV | 696 | 710 |
| 2134 | MLEIVVLLAVTFMLF | 701 | 715 |
| 2135 | VLLAVTFMLFRPDWL | 706 | 720 |
| 2136 | TFMLFRPDWLLDQVS | 711 | 725 |
| 2137 | RPDWLLDQVSERYQA | 716 | 730 |
| 2138 | LDQVSERYQARPAAE | 721 | 735 |
| 2139 | ERYQARPAAEVVQTA | 726 | 740 |
| 2140 | RPAAEVVQTAAALPH | 731 | 745 |
| 2141 | VVQTAAALPHNGRLV | 736 | 750 |
| 2142 | AALPHNGRLVAVLRG | 741 | 755 |
| 2143 | NGRLVAVLRGINLEG | 746 | 760 |
| 2144 | AVLRGINLEGDELTK | 751 | 765 |
| 2145 | INLEGDELTKTVAVA | 756 | 770 |
| 2146 | DELTKTVAVALPALD | 761 | 775 |
| 2147 | TVAVALPALDEGETL | 766 | 780 |
| 2148 | LPALDEGETLQGEAA | 771 | 785 |
| 2149 | EGETLQGEAAGRKRL | 776 | 790 |
| 2150 | QGEAAGRKRLTDAGL | 781 | 795 |
| 2151 | GRKRLTDAGLTIVAL | 786 | 800 |
| 2152 | TDAGLTIVALGDQVQ | 791 | 805 |
| 2153 | TIVALGDQVQIGGVR | 796 | 810 |
| 2154 | GDQVQIGGVRFGSTA | 801 | 815 |
| 2155 | IGGVRFGSTARRAGW | 806 | 820 |
| 2156 | FGSTARRAGWEQGWD | 811 | 825 |
| 2157 | RRAGWEQGWDVLELR | 816 | 830 |
| 2158 | EQGWDVLELRVPNPA | 821 | 835 |
| 2159 | VLELRVPNPARPAEF | 826 | 840 |
| 2160 | VPNPARPAEFWAYLP | 831 | 845 |
| 2161 | RPAEFWAYLPGLVLL | 836 | 850 |
| 2162 | WAYLPGLVLLALVWF | 841 | 855 |
| 2163 | GLVLLALVWFAQGRR | 846 | 860 |
| 2164 | ALVWFAQGRRQRAAA | 851 | 865 |
| 2165 | LVWFAQGRRQRAAAR | 852 | 866 |
| | Full Sequence | | |

| | |
|---|---|
| 2610 | MKNESSTTTADLEQLVAEADRGGRHAGGVAGATLAAGALVWSLFQLWYASP |
| | LPFSLHWGVENDTEARALHLGTAMFLGYLAYPATKRSARDRMPWYDWVLAL |
| | AAGFCGAYLYLFYNELAIRPGQPTSMDVATAVAGLLLLLEVTRRALGLPMTVL |
| | GAVFVLYALAGPWLPDVLAHRGASIERLMSHMWLTTEGVYGVALGVSVSYIFI |
| | FVLLGSLLDKCGAGNYMMQVSFALLGHLRGGPAKVAVVSSAVNGLVSASSVA |
| | NVVTGGIFTIPLMKKAGYGGVRAGAIETASSVNGQIMPPVMGAAAFLMIEYVGI |
| | PYTDIIRHAILPASISYIALFYSVHLEALKLGIEPMMAAGKPRTPLQKLAGWGMG |
| | ISGTLIAMGLVYWIGVGVQAVAGAAAIWILLAMLVALNIWLLRVAARHPDLPT |
| | EIDVNHPVRPEPWPTVRAGLHFLIPIGILVWCLSVEELSAGLSAFWAAAATLLQ |
| | MVTQRPLTAWFRGQAIAPAALLGWRDAIGGLQDDARNMIGIAIACGTAGLIVG |
| | AITLTGLGLRMTAFVELVSMGNVLLMLIFTAIVCLILGLGMPTTANYILMATLM |
| | APVVVELGAQNGLIIPLIAVHMFVFYYGIMADITPPVGLATFAAAAISGADPIKT |
| | GVQGVTYALRTAVLPFMFVFNPLLLLIDVNSWTELILVAGSATLASLTFASATL |
| | GWFRVRCTMLEIVVLLAVTFMLFRPDWLLDQVSERYQARPAAEVVQTAAALP |
| | HNGRLVAVLRGINLEGDELTKTVAVALPALDEGETLQGEAAGRKRLTDAGLTI |
| | VALGDQVQIGGVRFGSTARRAGWEQGWDVLELRVPNPARPAEFWAYLPGLVL |
| | LALVWFAQGRRQRAAAR |

[0059] TABLE 15 PT(O) ANT 13—Overlapping peptides covering the entire sequence of NP_880575.1 filamentous hemagglutinin transporter protein FhaC [B. pertussis Tohama I].

TABLE 15
PT(O) ANT 13-Overlapping peptides covering the entire sequence of NP_880575.1
hemagglutinin transporter protein FhaC [B. pertussis Tohama I]

| SEQ ID | | | |
|---|---|---|---|
| NO: | Peptide | Start | End |
| 2166 | MTDATNRFRPGLVGR | 1 | 15 |
| 2167 | NRFRPGLVGRALVRA | 6 | 20 |
| 2168 | GLVGRALVRAGLLFA | 11 | 25 |
| 2169 | ALVRAGLLFAVAACA | 16 | 30 |
| 2170 | GLLFAVAACAQAQLL | 21 | 35 |
| 2171 | VAACAQAQLLPGARD | 26 | 40 |
| 2172 | QAQLLPGARDLNRID | 31 | 45 |
| 2173 | PGARDLNRIDDRQRK | 36 | 50 |
| 2174 | LNRIDDRQRKEQLQR | 41 | 55 |
| 2175 | DRQRKEQLQRDIERA | 46 | 60 |
| 2176 | EQLQRDIERALTRPP | 51 | 65 |
| 2177 | DIERALTRPPVELNP | 56 | 70 |
| 2178 | LTRPPVELNPQSEAA | 61 | 75 |
| 2179 | VELNPQSEAAAPARK | 66 | 80 |
| 2180 | QSEAAAPARKPDATS | 71 | 85 |
| 2181 | APARKPDATSGHTVT | 76 | 90 |
| 2182 | PDATSGHTVTVHAVD | 81 | 95 |
| 2183 | GHTVTVHAVDLDFGV | 86 | 100 |
| 2184 | VHAVDLDFGVEGRLF | 91 | 105 |
| 2185 | LDFGVEGRLFDPAPL | 96 | 110 |
| 2186 | EGRLFDPAPLVQDYL | 101 | 115 |
| 2187 | DPAPLVQDYLNRPLD | 106 | 120 |
| 2188 | VQDYLNRPLDNEQLF | 111 | 125 |
| 2189 | NRPLDNEQLFLLVKA | 116 | 130 |
| 2190 | NEQLFLLVKALSAAL | 121 | 135 |
| 2191 | LLVKALSAALYDRGY | 126 | 140 |
| 2192 | LSAALYDRGYATSIV | 131 | 145 |
| 2193 | YDRGYATSIVTFVPP | 136 | 150 |
| 2194 | ATSIVTFVPPGVVDG | 141 | 155 |
| 2195 | TFVPPGVVDGVLKLK | 146 | 160 |
| 2196 | GVVDGVLKLKVEWGR | 151 | 165 |
| 2197 | VLKLKVEWGRIKGWL | 156 | 170 |
| 2198 | VEWGRIKGWLIDGKP | 161 | 175 |
| 2199 | IKGWLIDGKPLEGTR | 166 | 180 |
| 2200 | IDGKPLEGTRDRMMV | 171 | 185 |
| 2201 | LEGTRDRMMVFSAMP | 176 | 190 |
| 2202 | DRMMVFSAMPGWQDK | 181 | 195 |
| 2203 | FSAMPGWQDKVLNVF | 186 | 200 |
| 2204 | GWQDKVLNVFDIDQA | 191 | 205 |
| 2205 | VLNVFDIDQAIYNIN | 196 | 210 |
| 2206 | DIDQAIYNINNGGKT | 201 | 215 |
| 2207 | IYNINNGGKTGNITI | 206 | 220 |
| 2208 | NGGKTGNITIVPADE | 211 | 225 |
| 2209 | GNITIVPADEYGYSY | 216 | 230 |
| 2210 | VPADEYGYSYLDLQL | 221 | 235 |
| 2211 | YGYSYLDLQLQRRAL | 226 | 240 |
| 2212 | LDLQLQRRALPRVSL | 231 | 245 |
| 2213 | QRRALPRVSLGMDNS | 236 | 250 |
| 2214 | PRVSLGMDNSGPGTP | 241 | 255 |
| 2215 | GMDNSGPGTPENGRY | 246 | 260 |
| 2216 | GPGTPENGRYKYNAS | 251 | 265 |
| 2217 | ENGRYKYNASVTAND | 256 | 270 |
| 2218 | KYNASVTANDLLGLN | 261 | 275 |
| 2219 | VTANDLLGLNDTLGL | 266 | 280 |
| 2220 | LLGLNDTLGLYIGNR | 271 | 285 |
| 2221 | DTLGLYIGNRYYRDA | 276 | 290 |
| 2222 | YIGNRYYRDAGHDAE | 281 | 295 |
| 2223 | YYRDAGHDAERNYDL | 286 | 300 |
| 2224 | GHDAERNYDLMYSVP | 291 | 305 |
| 2225 | RNYDLMYSVPLGRTR | 296 | 310 |
| 2226 | MYSVPLGRTRLDLQT | 301 | 315 |
| 2227 | LGRTRLDLQTGYSTY | 306 | 320 |
| 2228 | LDLQTGYSTYRNLLK | 311 | 325 |
| 2229 | GYSTYRNLLKTRYGQ | 316 | 330 |
| 2230 | RNLLKTRYGQYQSAG | 321 | 335 |
| 2231 | TRYGQYQSAGNSRSF | 326 | 340 |
| 2232 | YQSAGNSRSFGLKAT | 331 | 345 |
| 2233 | NSRSFGLKATRLLYR | 336 | 350 |
| 2234 | GLKATRLLYRDTRSQ | 341 | 355 |
| 2235 | RLLYRDTRSQFSVYG | 346 | 360 |
| 2236 | DTRSQFSVYGGLKLR | 351 | 365 |
| 2237 | FSVYGGLKLRQNKNY | 356 | 370 |
| 2238 | GLKLRQNKNYLAGTR | 361 | 375 |
| 2239 | QNKNYLAGTRLDVSS | 366 | 380 |
| 2240 | LAGTRLDVSSKHYSD | 371 | 385 |
| 2241 | LDVSSKHYSDVTVGM | 376 | 390 |
| 2242 | KHYSDVTVGMQYSTQ | 381 | 395 |
| 2243 | VTVGMQYSTQRGANA | 386 | 400 |
| 2244 | QYSTQRGANAYFGDL | 391 | 405 |
| 2245 | RGANAYFGDLSFTRG | 396 | 410 |
| 2246 | YFGDLSFTRGVGVNN | 401 | 415 |
| 2247 | SFTRGVGVNNGKYAA | 406 | 420 |
| 2248 | VGVNNGKYAAYDERG | 411 | 425 |
| 2249 | GKYAAYDERGPQGNV | 416 | 430 |
| 2250 | YDERGPQGNVSRFNG | 421 | 435 |
| 2251 | PQGNVSRFNGSLAWT | 426 | 440 |
| 2252 | SRFNGSLAWTRYMAL | 431 | 445 |
| 2253 | SLAWTRYMALAGQPI | 436 | 450 |
| 2254 | RYMALAGQPIQWASQ | 441 | 455 |
| 2255 | AGQPIQWASQLGFQY | 446 | 460 |
| 2256 | QWASQLGFQYSRQQL | 451 | 465 |
| 2257 | LGFQYSRQQLLNSYQ | 456 | 470 |
| 2258 | SRQQLLNSYQITVGD | 461 | 475 |
| 2259 | LNSYQITVGDEYTVR | 466 | 480 |
| 2260 | ITVGDEYTVRGYNLR | 471 | 485 |
| 2261 | EYTVRGYNLRTSQSG | 476 | 490 |
| 2262 | GYNLRTSQSGDSGVY | 481 | 495 |
| 2263 | TSQSGDSGVYLSNTL | 486 | 500 |
| 2264 | DSGVYLSNTLTVPVQ | 491 | 505 |
| 2265 | LSNTLTVPVQFSLLG | 496 | 510 |
| 2266 | TVPVQFSLLGKQASV | 501 | 515 |
| 2267 | FSLLGKQASVAPFVG | 506 | 520 |
| 2268 | KQASVAPFVGADVGA | 511 | 525 |
| 2269 | APFVGADVGALKSNH | 516 | 530 |
| 2270 | ADVGALKSNHPDART | 521 | 535 |
| 2271 | LKSNHPDARTIRMAG | 526 | 540 |
| 2272 | PDARTIRMAGLAAGV | 531 | 545 |
| 2273 | IRMAGLAAGVRFDLP | 536 | 550 |
| 2274 | LAAGVRFDLPYARMS | 541 | 555 |
| 2275 | RFDLPYARMSFTYSK | 546 | 560 |
| 2276 | YARMSFTYSKPVGAQ | 551 | 565 |
| 2277 | FTYSKPVGAQPGGAP | 556 | 570 |
| 2278 | PVGAQPGGAPRAPVW | 561 | 575 |
| 2279 | PGGAPRAPVWLYINA | 566 | 580 |
| 2280 | PRAPVWLYINAGLSF | 570 | 584 |
| | Full Sequence | | |

| 2611 | MTDATNRFRPGLVGRALVRAGLLFAVAACAQAQLLPGARDLNRIDDRQRKEQ |
|---|---|
| | LQRDIERALTRPPVELNPQSEAAAPARKPDATSGHTVTVHAVDLDFGVEGRLF |
| | DPAPLVQDYLNRPLDNEQLFLLVKALSAALYDRGYATSIVTFVPPGVVDGVLK |
| | LKVEWGRIKGWLIDGKPLEGTRDRMMVFSAMPGWQDKVLNVFDIDQAIYNIN |
| | NGGKTGNITIVPADEYGYSYLDLQLQRRALPRVSLGMDNSGPGTPENGRYKYN |
| | ASVTANDLLGLNDTLGLYIGNRYYRDAGHDAERNYDLMYSVPLGRTRLDLQT |
| | GYSTYRNLLKTRYGQYQSAGNSRSFGLKATRLLYRDTRSQFSVYGGLKLRQNK |
| | NYLAGTRLDVSSKHYSDVTVGMQYSTQRGANAYFGDLSFTRGVGVNNGKYA |
| | AYDERGPQGNVSRFNGSLAWTRYMALAGQPIQWASQLGFQYSRQQLLNSYQI |
| | TVGDEYTVRGYNLRTSQSGDSGVYLSNTLTVPVQFSLLGKQASVAPFVGADVG |
| | ALKSNHPDARTIRMAGLAAGVRFDLPYARMSFTYSKPVGAQPGGAPRAPVWL |
| | YINAGLSF |

[0060] TABLE 16 PT(O) ANT 14—Overlapping peptides covering the entire sequence of NP_882038.1 membrane protein [B. pertussis Tohama I].

TABLE 16
PT(O) ANT 14-Overlapping peptides covering the entire sequence of NP_882038.1
membrane protein [B. pertussis Tohama I]

| SEQ ID | | | |
|---|---|---|---|
| NO: | Peptide | Start | End |
| 2281 | MQAVLTAALPVFALI | 1 | 15 |
| 2282 | TAALPVFALILTGWL | 6 | 20 |
| 2283 | VFALILTGWLAARWR | 11 | 25 |
| 2284 | LTGWLAARWRVLGPS | 16 | 30 |
| 2285 | AARWRVLGPSATDAL | 21 | 35 |
| 2286 | VLGPSATDALNRYVV | 26 | 40 |
| 2287 | ATDALNRYVVYLSLP | 31 | 45 |
| 2288 | NRYVVYLSLPALLFR | 36 | 50 |
| 2289 | YLSLPALLFRAMAQA | 41 | 55 |
| 2290 | ALLFRAMAQADLRQL | 46 | 60 |
| 2291 | AMAQADLRQLADYWD | 51 | 65 |
| 2292 | DLRQLADYWDFTAAV | 56 | 70 |
| 2293 | ADYWDFTAAVAGGIA | 61 | 75 |
| 2294 | FTAAVAGGIALTFGA | 66 | 80 |
| 2295 | AGGIALTFGAAILAC | 71 | 85 |
| 2296 | LTFGAAILACRRDGA | 76 | 90 |
| 2297 | AILACRRDGARLTDL | 81 | 95 |
| 2298 | RRDGARLTDLSLEGL | 86 | 100 |
| 2299 | RLTDLSLEGLATSYG | 91 | 105 |
| 2300 | SLEGLATSYGNAGYM | 96 | 110 |
| 2301 | ATSYGNAGYMGIPLC | 101 | 115 |
| 2302 | NAGYMGIPLCLALLG | 106 | 120 |
| 2303 | GIPLCLALLGPASLA | 111 | 125 |
| 2304 | LALLGPASLAPAIIT | 116 | 130 |
| 2305 | PASLAPAIITTLLTA | 121 | 135 |
| 2306 | PAIITTLLTACVLFG | 126 | 140 |
| 2307 | TLLTACVLFGVAIAL | 131 | 145 |
| 2308 | CVLFGVAIALIEFDQ | 136 | 150 |
| 2309 | VAIALIEFDQHRDRH | 141 | 155 |
| 2310 | IEFDQHRDRHWSATL | 146 | 160 |
| 2311 | HRDRHWSATLLKVAR | 151 | 165 |
| 2312 | WSATLLKVARALLRN | 156 | 170 |
| 2313 | LKVARALLRNPLLAA | 161 | 175 |
| 2314 | ALLRNPLLAAPLLGL | 166 | 180 |
| 2315 | PLLAAPLLGLACAAA | 171 | 185 |
| 2316 | PLLGLACAAAGITLP | 176 | 190 |
| 2317 | ACAAAGITLPAGLDN | 181 | 195 |
| 2318 | GITLPAGLDNYAALL | 186 | 200 |
| 2319 | AGLDNYAALLGASAS | 191 | 205 |
| 2320 | YAALLGASASPCALV | 196 | 210 |
| 2321 | GASASPCALVTIGLF | 201 | 215 |
| 2322 | PCALVTIGLFLAQSQ | 206 | 220 |
| 2323 | TIGLFLAQSQPGGDR | 211 | 225 |
| 2324 | LAQSQPGGDRGTVGL | 216 | 230 |
| 2325 | PGGDRGTVGLMVGGK | 221 | 235 |
| 2326 | GTVGLMVGGKLLLHP | 226 | 240 |
| 2327 | MVGGKLLLHPAVTAV | 231 | 245 |
| 2328 | LLLHPAVTAVLAFAV | 236 | 250 |
| 2329 | AVTAVLAFAVFDMPP | 241 | 255 |
| 2330 | LAFAVFDMPPLWAWC | 246 | 260 |
| 2331 | FDMPPLWAWCAVLMA | 251 | 265 |
| 2332 | LWAWCAVLMAALPIG | 256 | 270 |
| 2333 | AVLMAALPIGTGPFM | 261 | 275 |
| 2334 | ALPIGTGPFMLAQLY | 266 | 280 |
| 2335 | TGPFMLAQLYGRDAR | 271 | 285 |
| 2336 | LAQLYGRDARPSSRA | 276 | 290 |
| 2337 | GRDARPSSRAILLST | 281 | 295 |
| 2338 | PSSRAILLSTVLSVP | 286 | 300 |
| 2339 | ILLSTVLSVPTITAL | 291 | 305 |
| 2340 | VLSVPTITALVAWIG | 296 | 310 |
| 2341 | TITALVAWIGRQPLG | 301 | 315 |
| | Full Sequence | | |

| | |
|---|---|
| 2612 | MQAVLTAALPVFALILTGWLAARWRVLGPSATDALNRYVVYLSLPALLFRAM |
| | AQADLRQLADYWDFTAAVAGGIALTFGAAILACRRDGARLTDLSLEGLATSYG |
| | NAGYMGIPLCLALLGPASLAPAIITTLLTACVLFGVAIALIEFDQHRDRHWSATL |
| | LKVARALLRNPLLAAPLLGLACAAAGITLPAGLDNYAALLGASASPCALVTIGL |
| | FLAQSQPGGDRGTVGLMVGGKLLLHPAVTAVLAFAVFDMPPLWAWCAVLMA |
| | ALPIGTGPFMLAQLYGRDARPSSRAILLSTVLSVPTITALVAWIGRQPLG |

[0061] TABLE 17 PT(O) ANT 15—Overlapping peptides covering the entire sequence of NP_879835.1 S-adenosylmethionine—tRNA ribosyltransferase-isomerase [B. pertussis Tohama 1].

TABLE 17
PT(O) ANT 15-Overlapping peptides covering the entire sequence of NP_879835.1
S-adenosylmethionine--tRNA ribosyltransferase-isomerase [B. pertussis Tohama I]

| SEQ ID | | | |
|---|---|---|---|
| NO: | Peptide | Start | End |
| 2342 | MPTPLTLADFDYHLP | 1 | 15 |
| 2343 | TLADFDYHLPPELIA | 6 | 20 |
| 2344 | DYHLPPELIAQSPAA | 11 | 25 |
| 2345 | PELIAQSPAAERGGS | 16 | 30 |
| 2346 | QSPAAERGGSRLLHL | 21 | 35 |
| 2347 | ERGGSRLLHLDAASR | 26 | 40 |
| 2348 | RLLHLDAASRLHDRR | 31 | 45 |
| 2349 | DAASRLHDRRFPDLA | 36 | 50 |
| 2350 | LHDRRFPDLAGLLRP | 41 | 55 |
| 2351 | FPDLAGLLRPHDLLV | 46 | 60 |
| 2352 | GLLRPHDLLVFNDTR | 51 | 65 |
| 2353 | HDLLVFNDTRVIKAR | 56 | 70 |
| 2354 | FNDTRVIKARLTGQK | 61 | 75 |
| 2355 | VIKARLTGQKATGGK | 66 | 80 |
| 2356 | LTGQKATGGKVEVLV | 71 | 85 |
| 2357 | ATGGKVEVLVERITA | 76 | 90 |
| 2358 | VEVLVERITAPDRAL | 81 | 95 |
| 2359 | ERITAPDRALAHVRA | 86 | 100 |
| 2360 | PDRALAHVRASKSPG | 91 | 105 |
| 2361 | AHVRASKSPGPGMRL | 96 | 110 |
| 2362 | SKSPGPGMRLRLAEA | 101 | 115 |
| 2363 | PGMRLRLAEAFEAEV | 106 | 120 |
| 2364 | RLAEAFEAEVLGREG | 111 | 125 |
| 2365 | FEAEVLGREGELFDL | 116 | 130 |
| 2366 | LGREGELFDLRFPAP | 121 | 135 |
| 2367 | ELFDLRFPAPVLDLL | 126 | 140 |
| 2368 | RFPAPVLDLLDAHGA | 131 | 145 |
| 2369 | VLDLLDAHGATPLPP | 136 | 150 |
| 2370 | DAHGATPLPPYITHA | 141 | 155 |
| 2371 | TPLPPYITHAADATD | 146 | 160 |
| 2372 | YITHAADATDERRYQ | 151 | 165 |
| 2373 | ADATDERRYQTVYAR | 156 | 170 |
| 2374 | ERRYQTVYAREPGAV | 161 | 175 |
| 2375 | TVYAREPGAVAAPTA | 166 | 180 |
| 2376 | EPGAVAAPTAGLHFD | 171 | 185 |
| 2377 | AAPTAGLHFDQPMLE | 176 | 190 |
| 2378 | GLHFDQPMLEQLAAQ | 181 | 195 |
| 2379 | QPMLEQLAAQGVQRA | 186 | 200 |
| 2380 | QLAAQGVQRAFVTLH | 191 | 205 |
| 2381 | GVQRAFVTLHVGAGT | 196 | 210 |
| 2382 | FVTLHVGAGTFQPVR | 201 | 215 |
| 2383 | VGAGTFQPVRVQNLA | 206 | 220 |
| 2384 | FQPVRVQNLAEHIMH | 211 | 225 |
| 2385 | VQNLAEHIMHAEWYT | 216 | 230 |
| 2386 | EHIMHAEWYTVPEAT | 221 | 235 |
| 2387 | AEWYTVPEATVAAIA | 226 | 240 |
| 2388 | VPEATVAAIARARAH | 231 | 245 |
| 2389 | VAAIARARAHGGRIV | 236 | 250 |
| 2390 | RARAHGGRIVAVGTT | 241 | 255 |
| 2391 | GGRIVAVGTTSVRAL | 246 | 260 |
| 2392 | AVGTTSVRALESAAA | 251 | 265 |
| 2393 | SVRALESAAAQAQDG | 256 | 270 |
| 2394 | ESAAAQAQDGPLAAA | 261 | 275 |
| 2395 | QAQDGPLAAAQGDTR | 266 | 280 |
| 2396 | PLAAAQGDTRLFITP | 271 | 285 |
| 2397 | QGDTRLFITPGYRYR | 276 | 290 |
| 2398 | LFITPGYRYRAVDAL | 281 | 295 |
| 2399 | GYRYRAVDALLTNFH | 286 | 300 |
| 2400 | AVDALLTNFHLPQST | 291 | 305 |
| 2401 | LTNFHLPQSTLLMLV | 296 | 310 |
| 2402 | LPQSTLLMLVSALAG | 301 | 315 |
| 2403 | LLMLVSALAGVEPIR | 306 | 320 |
| 2404 | SALAGVEPIRRAYAH | 311 | 325 |
| 2405 | VEPIRRAYAHAVAER | 316 | 330 |
| 2406 | RAYAHAVAERYRFFS | 321 | 335 |
| 2407 | AVAERYRFFSYGDAM | 326 | 340 |
| 2408 | YRFFSYGDAMFIETP | 331 | 345 |
| 2409 | FFSYGDAMFIETPAP | 333 | 347 |
| | Full Sequence | | |

| | |
|---|---|
| 2613 | MPTPLTLADFDYHLPPELIAQSPAAERGGSRLLHLDAASRLHDRRFPDLAGLLR |
| | PHDLLVENDTRVIKARLTGQKATGGKVEVLVERITAPDRALAHVRASKSPGPG |
| | MRLRLAEAFEAEVLGREGELFDLRFPAPVLDLLDAHGATPLPPYITHAADATD |
| | ERRYQTVYAREPGAVAAPTAGLHFDQPMLEQLAAQGVQRAFVTLHVGAGTF |
| | QPVRVQNLAEHIMHAEWYTVPEATVAAIARARAHGGRIVAVGTTSVRALESA |
| | AAQAQDGPLAAAQGDTRLFITPGYRYRAVDALLTNFHLPQSTLLMLVSALAG |
| | VEPIRRAYAHAVAERYRFFSYGDAMFIETPAP |

[0062] TABLE 18 PT(O) ANT 16—Overlapping peptides covering the entire sequence of NP_879350.1 LysR family transcriptional regulator [B. pertussis Tohama I].

TABLE 18
PT(O) ANT 16-Overlapping peptides covering the entire sequence of NP_879350.1
LysR family transcriptional regulator [B. pertussis Tohama I]

| SEQ ID | | | |
|---|---|---|---|
| NO: | Peptide | Start | End |
| 2410 | MQDLNDLYYFAQVVE | 1 | 15 |
| 2411 | DLYYFAQVVEQGGFS | 6 | 20 |
| 2412 | AQVVEQGGFSAASRV | 11 | 25 |
| 2413 | QGGFSAASRVLDVPK | 16 | 30 |
| 2414 | AASRVLDVPKSRLSR | 21 | 35 |
| 2415 | LDVPKSRLSRRISQL | 26 | 40 |
| 2416 | SRLSRRISQLEDRLG | 31 | 45 |
| 2417 | RISQLEDRLGVRLLQ | 36 | 50 |
| 2418 | EDRLGVRLLQRTTRR | 41 | 55 |
| 2419 | VRLLQRTTRRLRLTT | 46 | 60 |
| 2420 | RTTRRLRLTTAGERY | 51 | 65 |
| 2421 | LRLTTAGERYLHYCQ | 56 | 70 |
| 2422 | AGERYLHYCQEMTAS | 61 | 75 |
| 2423 | LHYCQEMTASARAAE | 66 | 80 |
| 2424 | EMTASARAAEDAMRQ | 71 | 85 |
| 2425 | ARAAEDAMRQLQSAP | 76 | 90 |
| 2426 | DAMRQLQSAPAGPVV | 81 | 95 |
| 2427 | LQSAPAGPVVVSCPV | 86 | 100 |
| 2428 | AGPVVVSCPVSIAQQ | 91 | 105 |
| 2429 | VSCPVSIAQQMLAPL | 96 | 110 |
| 2430 | SIAQQMLAPLLPEFL | 101 | 115 |
| 2431 | MLAPLLPEFLDAWPS | 106 | 120 |
| 2432 | LPEFLDAWPSVSVQL | 111 | 125 |
| 2433 | DAWPSVSVQLLVTNR | 116 | 130 |
| 2434 | VSVQLLVTNRRVDVI | 121 | 135 |
| 2435 | LVTNRRVDVIREGVD | 126 | 140 |
| 2436 | RVDVIREGVDLALRV | 131 | 145 |
| 2437 | REGVDLALRVRTKLD | 136 | 150 |
| 2438 | LALRVRTKLDTDAEL | 141 | 155 |
| 2439 | RTKLDTDAELVVKHL | 146 | 160 |
| 2440 | TDAELVVKHLGIASG | 151 | 165 |
| 2441 | VVKHLGIASGTLVAS | 156 | 170 |
| 2442 | GIASGTLVASPAYLQ | 161 | 175 |
| 2443 | TLVASPAYLQRHGTP | 166 | 180 |
| 2444 | PAYLQRHGTPETPQE | 171 | 185 |
| 2445 | RHGTPETPQELASHR | 176 | 190 |
| 2446 | ETPQELASHRTLSFN | 181 | 195 |
| 2447 | LASHRTLSFNDPQNE | 186 | 200 |
| 2448 | TLSFNDPQNEVRWPL | 191 | 205 |
| 2449 | DPQNEVRWPLTNQRG | 196 | 210 |
| 2450 | VRWPLTNQRGESVEV | 201 | 215 |
| 2451 | TNQRGESVEVAVQPV | 206 | 220 |
| 2452 | ESVEVAVQPVLASND | 211 | 225 |
| 2453 | AVQPVLASNDFIVLT | 216 | 230 |
| 2454 | LASNDFIVLTQAAVR | 221 | 235 |
| 2455 | FIVLTQAAVRGRGIA | 226 | 240 |
| 2456 | QAAVRGRGIALLPSM | 231 | 245 |
| 2457 | GRGIALLPSMASEAE | 236 | 250 |
| 2458 | LLPSMASEAELRRGE | 241 | 255 |
| 2459 | ASEAELRRGELVRVL | 246 | 260 |
| 2460 | LRRGELVRVLPDWRS | 251 | 265 |
| 2461 | LVRVLPDWRSPEGIV | 256 | 270 |
| 2462 | PDWRSPEGIVHCIYP | 261 | 275 |
| 2463 | PEGIVHCIYPSRRGM | 266 | 280 |
| 2464 | HCIYPSRRGMMPAVR | 271 | 285 |
| 2465 | SRRGMMPAVRAFLDF | 276 | 290 |
| 2466 | MPAVRAFLDFLAKRV | 281 | 295 |
| 2467 | AFLDFLAKRVPPLVR | 286 | 300 |
| 2468 | LAKRVPPLVRQSDTA | 291 | 305 |
| 2469 | KRVPPLVRQSDTARP | 293 | 307 |
| 2614 | Full Sequence | | |

MQDLNDLYYFAQVVEQGGFSAASRVLDVPKSRLSRRISQLEDRLGVRLLQRTT
RRLRLTTAGERYLHYCQEMTASARAAEDAMRQLQSAPAGPVVVSCPVSIAQQ
MLAPLLPEFLDAWPSVSVQLLVTNRRVDVIREGVDLALRVRTKLDTDAELVV
KHLGIASGTLVASPAYLQRHGTPETPQELASHRTLSFNDPQNEVRWPLTNQRG
ESVEVAVQPVLASNDFIVLTQAAVRGRGIALLPSMASEAELRRGELVRVLPDW
RSPEGIVHCIYPSRRGMMPAVRAFLDFLAKRVPPLVRQSDTARP

[0063] TABLE 19 PT(O) ANT 17—Overlapping peptides covering the entire sequence of NP_882010.1 NADH dehydrogenase [B. pertussis Tohama I].

TABLE 19
PT(O) ANT 17-Overlapping peptides covering the entire sequence of NP_882010.1
NADH dehydrogenase [B. pertussis Tohama I]

| SEQ ID NO: | Peptide | Start | End |
|---|---|---|---|
| 2470 | MTQTPNTGSPHRVVI | 1 | 15 |
| 2471 | NTGSPHRVVIVGGGA | 6 | 20 |
| 2472 | HRVVIVGGGAGGLEL | 11 | 25 |
| 2473 | VGGGAGGLELAAKLG | 16 | 30 |
| 2474 | GGLELAAKLGRAHGR | 21 | 35 |
| 2475 | AAKLGRAHGRERVTL | 26 | 40 |
| 2476 | RAHGRERVTLVDSRP | 31 | 45 |
| 2477 | ERVTLVDSRPFHIWK | 36 | 50 |
| 2478 | VDSRPFHIWKPSLHE | 41 | 55 |
| 2479 | FHIWKPSLHEAAAGT | 46 | 60 |
| 2480 | PSLHEAAAGTLDIHQ | 51 | 65 |
| 2481 | AAAGTLDIHQEGLSY | 56 | 70 |
| 2482 | LDIHQEGLSYLMLAN | 61 | 75 |
| 2483 | EGLSYLMLANMCNFT | 66 | 80 |
| 2484 | LMLANMCNFTFAQGE | 71 | 85 |
| 2485 | MCNFTFAQGELQGIE | 76 | 90 |
| 2486 | FAQGELQGIERERRQ | 81 | 95 |
| 2487 | LQGIERERRQIQVGP | 86 | 100 |
| 2488 | RERRQIQVGPVADPS | 91 | 105 |
| 2489 | IQVGPVADPSGQQVL | 96 | 110 |
| 2490 | VADPSGQQVLPPREL | 101 | 115 |
| 2491 | GQQVLPPRELSYDTL | 106 | 120 |
| 2492 | PPRELSYDTLVLAMG | 111 | 125 |
| 2493 | SYDTLVLAMGSTSNF | 116 | 130 |
| 2494 | VLAMGSTSNFFNTPG | 121 | 135 |
| 2495 | STSNFFNTPGAAEHA | 126 | 140 |
| 2496 | FNTPGAAEHAVTLDT | 131 | 145 |
| 2497 | AAEHAVTLDTTENAE | 136 | 150 |
| 2498 | VILDTTENAEQFRLT | 141 | 155 |
| 2499 | TENAEQFRLTMLKAM | 146 | 160 |
| 2500 | QFRLTMLKAMVQVDL | 151 | 165 |
| 2501 | MLKAMVQVDLRKVHD | 156 | 170 |
| 2502 | VQVDLRKVHDPSARL | 161 | 175 |
| 2503 | RKVHDPSARLDLVIV | 166 | 180 |
| 2504 | PSARLDLVIVGGGAT | 171 | 185 |
| 2505 | DLVIVGGGATGVELA | 176 | 190 |
| 2506 | GGGATGVELAVELIE | 181 | 195 |
| 2507 | GVELAVELIEASHVV | 186 | 200 |
| 2508 | VELIEASHVVSAYGL | 191 | 205 |
| 2509 | ASHVVSAYGLPNFRA | 196 | 210 |
| 2510 | SAYGLPNFRADRDLV | 201 | 215 |
| 2511 | PNFRADRDLVITLVE | 206 | 220 |
| 2512 | DRDLVITLVEGAPRI | 211 | 225 |
| 2513 | ITLVEGAPRILSALP | 216 | 230 |
| 2514 | GAPRILSALPEKISR | 221 | 235 |
| 2515 | LSALPEKISRATHAR | 226 | 240 |
| 2516 | EKISRATHARLTELG | 231 | 245 |
| 2517 | ATHARLTELGVRVET | 236 | 250 |
| 2518 | LTELGVRVETDCRVA | 241 | 255 |
| 2519 | VRVETDCRVAEVGAD | 246 | 260 |
| 2520 | DCRVAEVGADHVVTA | 251 | 265 |
| 2521 | EVGADHVVTADGRRF | 256 | 270 |
| 2522 | HVVTADGRRFEATMC | 261 | 275 |
| 2523 | DGRRFEATMCLWAAG | 266 | 280 |
| 2524 | EATMCLWAAGIEGPP | 271 | 285 |
| 2525 | LWAAGIEGPPLFRQL | 276 | 290 |
| 2526 | IEGPPLFRQLGLPLN | 281 | 295 |
| 2527 | LFRQLGLPLNRLGQL | 286 | 300 |
| 2528 | GLPLNRLGQLEVNER | 291 | 305 |
| 2529 | RLGQLEVNERQESPD | 296 | 310 |
| 2530 | EVNERQESPDPHILA | 301 | 315 |
| 2531 | QESPDPHILALGDCC | 306 | 320 |
| 2532 | PHILALGDCCAAPWK | 311 | 325 |
| 2533 | LGDCCAAPWKDGRTV | 316 | 330 |
| 2534 | AAPWKDGRTVPARAQ | 321 | 335 |
| 2535 | DGRTVPARAQAAHQQ | 326 | 340 |
| 2536 | PARAQAAHQQADYLA | 331 | 345 |
| 2537 | AAHQQADYLARKLTA | 336 | 350 |
| 2538 | ADYLARKLTARLRNA | 341 | 355 |
| 2539 | RKLTARLRNAAEPTE | 346 | 360 |
| 2540 | RLRNAAEPTEAYAYH | 351 | 365 |
| 2541 | AEPTEAYAYHDHGSL | 356 | 370 |
| 2542 | AYAYHDHGSLVSLGQ | 361 | 375 |
| 2543 | DHGSLVSLGQGSGVG | 366 | 380 |
| 2544 | VSLGQGSGVGSLMGK | 371 | 385 |
| 2545 | GSGVGSLMGKLAGRG | 376 | 390 |
| 2546 | SLMGKLAGRGLFVSG | 381 | 395 |
| 2547 | LAGRGLFVSGTLARL | 386 | 400 |
| 2548 | LFVSGTLARLMYMSL | 391 | 405 |
| 2549 | TLARLMYMSLHLMHH | 396 | 410 |
| 2550 | MYMSLHLMHHRAVLG | 401 | 415 |
| 2551 | HLMHHRAVLGISRTA | 406 | 420 |
| 2552 | RAVLGISRTATLALA | 411 | 425 |
| 2553 | ISRTATLALARLLMR | 416 | 430 |
| 2554 | TLALARLLMRRTRPR | 421 | 435 |
| 2555 | ARLLMRRTRPRVKLH | 425 | 439 |
| | Full Sequence | | |

| | |
|---|---|
| 2615 | MTQTPNTGSPHRVVIVGGGAGGLELAAKLGRAHGRERVTLVDSRPFHIWKPS |
| | LHEAAAGTLDIHQEGLSYLMLANMCNFTFAQGELQGIERERRQIQVGPVADPS |
| | GQQVLPPRELSYDTLVLAMGSTSNFFNTPGAAEHAVTLDTTENAEQFRLTMLK |
| | AMVQVDLRKVHDPSARLDLVIVGGGATGVELAVELIEASHVVSAYGLPNFRA |
| | DRDLVITLVEGAPRILSALPEKISRATHARLTELGVRVETDCRVAEVGADHVVT |
| | ADGRRFEATMCLWAAGIEGPPLFRQLGLPLNRLGQLEVNERQESPDPHILALG |
| | DCCAAPWKDGRTVPARAQAAHQQADYLARKLTARLRNAAEPTEAYAYHDH |
| | GSLVSLGQGSGVGSLMGKLAGRGLFVSGTLARLMYMSLHLMHHRAVLGISRT |
| | ATLALARLLMRRTRPRVKLH |

[0064] TABLE 20. PT(O) ANT 18—Overlapping peptides covering the entire sequence of NP_880884.1 type III secretion system protein [B. pertussis Tohama I]

TABLE 20
PT(O) ANT 18-Overlapping peptides covering the entire sequence of NP_880884.1
type III secretion system protein [B. pertussis Tohama I]

| SEQ ID NO: | Peptide | Start | End |
|---|---|---|---|
| 2556 | MSDTDPFSLALFLAL | 1 | 15 |
| 2557 | PFSLALFLALLALVP | 6 | 20 |
| 2558 | LFLALLALVPLIVVM | 11 | 25 |
| 2559 | LALVPLIVVMTTSFL | 16 | 30 |
| 2560 | LIVVMTTSFLKIAVV | 21 | 35 |
| 2561 | TTSFLKIAVVLALVR | 26 | 40 |
| 2562 | KIAVVLALVRNALGV | 31 | 45 |
| 2563 | LALVRNALGVQQVPP | 36 | 50 |
| 2564 | NALGVQQVPPNMALY | 41 | 55 |
| 2565 | QQVPPNMALYGLALI | 46 | 60 |
| 2566 | NMALYGLALILSAYV | 51 | 65 |
| 2567 | GLALILSAYVMAPVV | 56 | 70 |
| 2568 | LSAYVMAPVVHRIGT | 61 | 75 |
| 2569 | MAPVVHRIGTEVQAL | 66 | 80 |
| 2570 | HRIGTEVQALTAQAG | 71 | 85 |
| 2571 | EVQALTAQAGESGTA | 76 | 90 |
| 2572 | TAQAGESGTAAPMAL | 81 | 95 |
| 2573 | ESGTAAPMALDAVLG | 86 | 100 |
| 2574 | APMALDAVLGVAERG | 91 | 105 |
| 2575 | DAVLGVAERGVGPLR | 96 | 110 |
| 2576 | VAERGVGPLRAFMLR | 101 | 115 |
| 2577 | VGPLRAFMLRNSQPA | 106 | 120 |
| 2578 | AFMLRNSQPAQRDFF | 111 | 125 |
| 2579 | NSQPAQRDFFLRTAR | 116 | 130 |
| 2580 | QRDFFLRTARHLWGE | 121 | 135 |
| 2581 | LRTARHLWGEEASRD | 126 | 140 |
| 2582 | HLWGEEASRDLSEDN | 131 | 145 |
| 2583 | EASRDLSEDNLLVLT | 136 | 150 |
| 2584 | LSEDNLLVLTPAFLV | 141 | 155 |
| 2585 | LLVLTPAFLVSELTA | 146 | 160 |
| 2586 | PAFLVSELTAAFQLG | 151 | 165 |
| 2587 | SELTAAFQLGFLLYL | 156 | 170 |
| 2588 | AFQLGFLLYLPFIII | 161 | 175 |
| 2589 | FLLYLPFIIIDLIVS | 166 | 180 |
| 2590 | PFIIIDLIVSNILLA | 171 | 185 |
| 2591 | DLIVSNILLAMGMMM | 176 | 190 |
| 2592 | NILLAMGMMMVSPVT | 181 | 195 |
| 2593 | MGMMMVSPVTISMPL | 186 | 200 |
| 2594 | VSPVTISMPLKLFLF | 191 | 205 |
| 2595 | ISMPLKLFLFVMVDG | 196 | 210 |
| 2596 | KLFLFVMVDGWTRLI | 201 | 215 |
| 2597 | VMVDGWTRLIQGLVL | 206 | 220 |
| 2598 | DGWTRLIQGLVLSYR | 209 | 223 |
| | Full Sequence | | |

| | |
|---|---|
| 2616 | MSDTDPFSLALFLALLALVPLIVVMTTSFLKIAVVLALVRNALGVQQVPPN |
| | MALYGLALILSAYVMAPVVHRIGTEVQALTAQAGESGTAAPMALDAVLG |
| | VAERGVGPLRAFMLRNSQPAQRDFFLRTARHLWGEEASRDLSEDNLLVLT |
| | PAFLVSELTAAFQLGFLLYLPFIIIDLIVSNILLAMGMMMVSPVTISMPLKLF |
| | LFVMVDGWTRLIQGLVLSYR |

TABLE 21
List of the immunodominant antigens with reactivity and frequency
of recognition equal or better than aP vaccine antigens.

| | | | % of | % of |
|---|---|---|---|---|
| | NCBI Reference | Length | Total | Donor |
| ORF Description in order | Sequence | (a.a.) | magnitude | response |
| D-alanyl-D-alanine | WP_003809423.1 | 478 | 1.74 | 25 |
| carboxypeptidase | | | | |
| Membrane protein | WP_010927254 | 563 | 1.35 | 17.5 |
| insertase YidC | | | | |
| Maltose alpha-D- | WP_010930308.1 | 1113 | 0.82 | 15 |
| glucosyltransferase | | | | |
| Virulence sensor | WP_010930608 | 1238 | 0.76 | 15 |
| protein BvgS | | | | |
| 1,4-alpha-glucan branching | WP_010930307 | 731 | 0.53 | 15 |
| protein GIgB | | | | |
| EI24 domain-containing protein | WP_010931453 | 266 | 0.52 | 15 |
| NADH-quinone oxidoreductase | WP_003813916.1 | 494 | 0.45 | 12.5 |
| subunit N | | | | |
| BrkA autotransporter | WP_010931506.1 | 1010 | 0.44 | 20 |
| Bifunctional hemolysin- | WP_010929995.1 | 1706 | 0.40 | 22.5 |
| adenylate cyclase toxin | | | | |
| YihY/virulence factor BrkB | WP_003808614.1 | 296 | 0.34 | 12.5 |
| family protein | | | | |
| Filamentous hemagglutinin | WP_010930614.1 | 584 | 0.29 | 15 |
| transporter protein FhaC | | | | |
| Antioxidant protein | WP_003813333.1 | 213 | 0.27 | 15 |
| (Peroxiredoxin) | | | | |
| S-adenosylmethionine--tRNA | WP_010930156 | 347 | 0.27 | 17.5 |
| ribosyltransferase-isomerase QueA | | | | |
| TRAP transporter fused | WP_010930804.1 | 866 | 0.26 | 12.5 |
| permease subunit | | | | |
| LysR family transcriptional | WP_010929840.1 | 307 | 0.25 | 12.5 |
| regulator | | | | |

### Example 2

[0065] Experimentally defined BP epitope pools can be used to detect BP-specific responses in vaccinated individuals.

[0066] Here, the inventors report that BP-specific CD4+ T cell responses are detected in vaccinated individuals irrespective of the type of vaccine administered in childhood by activation induced marker (AIM) or intracellular cytokine staining (ICS) assays.

[0067] As shown in FIGS. 12A-12C, a set of 132 peptides from aP vaccine antigens (PT(E)VAC) (Table 1) previously experimentally defined (Bancroft et al., 2016) and thoroughly characterized (da Silva Antunes et al., 2018; da Silva Antunes et al., 2021; da Silva Antunes et al., 2020) was combined into a pool of epitopes (megapool) and used in short-culture stimulation of PBMCs in AIM or ICS assays. The PT(E)VAC megapool includes peptides from 5 antigens [Filamentous hemagglutinin (FHA), pertactin (PRN), pertussis toxin (PT), and fimbrial proteins 2 and 3 (Fim2/3)], which are the only 5 antigens contained in the current acellular (aP) vaccine administered in the United States. In parallel, an epitope pool of 170 experimentally defined peptides (PT(E)R) (Table 2) covering the most immunogenic peptides across the entire BP genome, and not including peptides derived from aP vaccine antigens, was tested in the same cohort. This megapool was developed from the findings of an ongoing NIH Pertussis T cell contract (75N93019C00066) that spearheaded the identification of novel T cell epitope targets and novel immunogenic antigens (da Silva Antunes et al. in preparation). Interestingly, BP-specific reactivity was similar between the 2 megapools using an AIM assay after 24 h of stimulation (FIG. 12A). Using a threshold for positivity of 100 AIM+ cells (indicated by the dotted line), 20/20 (100%) of donors showed positive responses after PT(E)VAC stimulation, and 16/20 (80%) of donors showed positive responses after (PT(E)R) stimulation. Surprisingly, BP-specific responses were observed regardless of vaccine used in childhood immunization (FIG. 12B). Detection of responses for both PT(E)VAC and PT(E)R epitopes pools were also observed using an ICS assay (FIG. 12C). As expected, IFNλ, TNFα and IL-2 responses were the most prevalent.

### Example 3

[0068] Focusing on individual selected antigens.

[0069] Individual antigen responses for the most immunodominant antigens (FIG. 13), identified in a BP genome-wide screening study (da Silva Antunes et al. in preparation) can also be detected in vaccinated individuals using the AIM assay (FIG. 14).

[0070] Briefly, following a genome-wide map of BP-specific CD4 T cell reactivity and identification of novel epitopes and their antigen of origin (or ORFs), the inventorsdefined a high immunogenicity threshold based on the interval of the known aP vaccine antigen responses both in terms of magnitude or donor response (frequency of recognition>12.5%). This strategy allowed us to identify 19 novel antigens with equal or better reactivity than aP vaccine antigens (FIG. 13—Table insert). Among the top novel antigens, adenylate cyclase toxin (ACT), BvgS and BrkA, known to be strongly associated with virulence and BP infection in mouse models, were identified, as well as a type III secretion system protein (T3SS) or proteins involved in regulation, serum resistance, or DNA-binding. Moreover, several enzymes involved in roles such as cell wall and cell membrane assembly (D-alanyl-D-alanine carboxypeptidase and membrane protein insertase YidC, respectively), metabolic processes related with glycogen biosynthesis, oxidative phosphorylation or other catalytic processes were also highly reactive and elicited immunodominant responses. Interestingly, the reactivity to these antigens is about 2-fold higher than for vaccine antigens (FIGS. 2A-2D).

[0071] As shown in FIGS. 10A-10B, antigen-specific responses for the 19 BP most immunodominant antigens not included in the aP vaccine can also be detected, although with variable degree of reactivity and responsiveness. The epitope pools for ACT (ANT10) and BrKA (ANT7) elected strong responses, and were the highest immunoreactive targets with 100% (20/20), and 80% (16/20) of positive donor response, respectively. Interestingly, and similar to what observed for (PT(E)VAC) and (PT(E)R) stimulation, responses to all antigens were detected irrespectively of the vaccine administered in childhood immunization (not shown).

[0072] The inventors demonstrate that through the use of peptide pools described in this disclosure, detection and quantification of BP-specific T cells can be easily and rapidly accomplished with high sensitivity in vaccinated cohorts, irrespectively of the nature of their childhood BP vaccine immunization. The newly developed BP human T cell epitope pools can be further used to measure T cell responses against BP colonization in naturally infected, and clinically diagnosed acute or convalescent cohorts. The disclosure identifies novel immunogenic targets that are crucial in the design of vaccines for superior control of BP infection and induction of long-lasting protection.

### Example 4

[0073] Experimental design for a genome-wide screen of Bordetella pertussis human T cell epitopes.

[0074] Previous studies characterized human CD4+ T cell reactivity to the four main antigens contained in the acellular pertussis vaccine, but little to no information is available regarding responses to other BP antigens. Here, the inventors defined human CD4+ T cell reactivity spanning the entire BP proteome, by an approach previously used to draw a genome-wide map of human CD4+ T cell responses to Mycobacterium tuberculosis (MTB) (Lindestam Arlehamn et al., 2013).

[0075] The approach is based on predicting potential dominant CD4+ T cell epitopes from each ORFs encoded in the bacterial genome, based on their predicted promiscuous binding to HLA class II molecules (Paul et al., 2015). Previous studies demonstrated that this approach identifies the most dominant and prevalent epitopes, corresponding to approximately 50% of the total overall response (Grifoni et al., 2020; Oseroff et al., 2010). Accordingly, the inventors synthetized a library encompassing a total of 24,877 peptides derived from 3,305 ORFs. The library was arranged in 133 pools of 188 15-mer peptides (hereafter called MegaPools; MP). Each MP was further divided in 8 pools of 22-24 individual peptides (hereafter called MesoPools; MS). A summary of the screening strategy is shown in FIG. 8.

[0076] The library was screened for CD4+ T cell reactivity utilizing PBMCs collected in the 2013 to 2021 period from 40 participants, 21 males and 19 females, of 18 to 40 years of age. Based on clinical records and year of birth, 20 of the participants were immunized in childhood with a whole-cell Pertussis (wP) vaccine, and 20 were originally immunized in childhood with an acellular Pertussis (aP) vaccine.

### Example 5

[0077] Large breadth of BP-specific CD4+ T cell responses in humans.

[0078] CD4+ T cell reactivity was assayed directly ex vivo using an Activation Induced Marker (AIM) assay (FIGS. 12A-12C), utilizing the combination of markers OX40+CD25+(Dan et al., 2016), previously validated for epitope identification in the context of BP (da Silva Antunes et al., 2020). As done previously the threshold of positivity (TP) was based on the median twofold standard deviation of T cell reactivity in negative controls, corresponding to 285 cells per million of CD4+ T cells (0.0285%), and values above TP and with a stimulation index (S.I.)>2 were considered positive as previously described (da Silva Antunes et al., 2020; Tarke et al., 2022). An example of screening of the whole genome-wide library in a representative donor is shown in FIGS. 1A-1D. In this particular donor, 32 positive MPs were identified (FIG. 1A). FIG. 1B illustrates the deconvolution of one representative MP (MP #39), which yielded 3 positive MS. FIG. 1C illustrates the deconvolution of the MS with the highest reactivity (MS #39.7), which identified 7 individual epitopes above the significance threshold. Overall, this particular donor recognized 148 different epitopes. FIG. 1D shows the position of each individual epitope identified across the aligned BP genome, using the Tohama I and D420 BP strains as reference.

[0079] To define the global pattern of immunodominance in the study cohort, the inventors tested PBMCs from each donor with sets of the same peptide library and recorded the number of donors in which a positive response was detected. The screening of the entire cohort revealed a total of 414 and 79 epitopes recognized by in at least 2 or 3 donors respectively (FIG. 2A). Each individual epitope was also mapped back to the individual BP ORFs of origin. A total of 422 and 171 ORFs recognized by more than 2 and 3 donors respectively (FIG. 2B). Parallel analyses quantified the total response across the entire cohort for each individual epitope or ORF. A total of 600 epitopes and 175 ORFs were required to account for 50% of the total response, 1506 epitopes or 443 ORFs accounted for 75% of the response, and 2444 epitopes or 765 ORFs were required to account for 90% of the total response (FIGS. 2C, 2D). Overall, the first quantitation of human CD4+ T cell responses to the whole BP genome revealed an unprecedented large breadth of antigens and epitopes recognized.

### Example 6

[0080] Immunodominance in BP responses.

[0081] The overall magnitude of response and localization of each recognized ORF/antigen across the entire cohort was next visualized summing all the reactivity of individual epitopes across all donors on a linear map of the BP genome (FIG. 3). As expected, the known aP vaccine antigens (i.e., pertactin, PRN; two serotypes of fimbriae, Fim2/3; filamentous hemagglutinin, FHA; and pertussis toxin, PtTox) were amongst the most dominant antigens (FIG. 3). In particular, FHA was the antigen with the highest magnitude (2.12% of total response) and the most frequently recognized (45.0% of donors) of all the BP antigens. PtTox (ORF 1-5) and PRN were also associated with a high reactivity (1.34% and 1.33% of total response, respectively) and high frequency of donor recognition (30.0% and 40%, respectively). Fim 3 and Fim 2 had the lowest reactivity (0.24% and 0.09% of total response, respectively) and were the least recognized antigens among the aP vaccine antigens (12.5% and 5% of donors, respectively). Strikingly, the cumulative response of the 5 aP vaccine antigens only accounted for a minor fraction of the total CD4+ T cell response (5.13% of the total response).

[0082] Conversely a high and broad reactivity was associated with non-aP vaccine antigens (FIG. 3), and a total of 15 antigens were associated with reactivity and frequency of recognition equal or better than aP vaccine antigens (Table 1). Together, these 15 antigens and the 5 vaccine antigens accounted for about 14% of the total response, underlining the extreme breadth and heterogeneity of responses. ORFs associated with the highest magnitude were also associated with the highest frequency of responses. The 15 antigens eliciting same level of responses than the vaccine antigens included ORFs from enzymes involved in roles such as cell wall and cell membrane assembly (D-alanyl-D-alanine carboxypeptidase and membrane protein insertase YidC, respectively) and from a transporter protein (Fha C) that mediates the secretion of aP vaccine antigen FHA. Among the dominant antigens were also adenylate cyclase toxin (ACT), BvgS and BrkA, which are associated with virulence and BP infection (DiVenere et al., 2022; Elder and Harvill, 2004; Moon et al., 2017). Overall, these results successfully re-identified aP vaccine antigens, and in addition greatly expanded the repertoire of antigens recognized by human BP-specific CD4 T cell responses.

### Example 7

[0083] Similar recognition of aP and non-aP vaccine antigens as a function of priming vaccination in infancy.

[0084] Half of the donor cohort was vaccinated in childhood with the wP vaccine, which is expected to generate responses targeting a wide range of BP antigens, while the other half was vaccinated in childhood with the aP vaccine, containing only four different antigens. To address whether the original priming would result in different repertoires of antigens recognized in adulthood, the inventors compared responses from participants primed in infancy with aP versus wP vaccines for recognition of aP and non-aP vaccine antigens. No difference was detected for aP vaccine antigens (FIGS. 4A-4C), considering either magnitude (sum of all reactivity of individual epitopes for a single donor) (FIG. 4A), number of epitopes (FIG. 4B) or ORFs recognized (FIG. 4C). Similar magnitude, number of epitopes and ORFs between aP- and wP-primed donors were also observed when only responses to non-aP vaccine antigens were considered (FIGS. 4D-4F). Overall, BP specific-CD4+ T cells responses did not differ as function of the original priming vaccination in infancy. The lack of significant differences between aP and wP originally primed donors, and the large breadth of responses, particularly in aP-primed donors is consistent with BP infection frequently occurring in vaccinated donors.

### Example 8

[0085] Sequence conservation and immunogenicity of BP peptides.

[0086] The degree of conservation of microbial sequences in different isolates and/or related species 5 influence immunodominance, as conserved sequences have implicitly more opportunities to be recognized (Bui et al., 2007; Westernberg et al., 2016). Here, the inventors performed a conservation analysis amongst different strains of BP or amongst different species of the genus Bordetella. Peptides were divided in subsets according to their immunogenicity or degree of conservation in different isolates or related species. In terms of immunogenicity, peptides were arbitrarily divided in not recognized, subdominant (recognized in 1 donor), or dominant (recognized in >=2 donors). In terms of conservation, peptides were classified as variable (<75% of homology), intermediate (75-95% of homology), or conserved (>95% of homology). Finally, peptides were further segregated as derived from aP vaccine antigens, or from non-aP vaccine antigens.

[0087] Twenty different BP strains with complete genomes and representative of the various clades of BP (Felice et al., 2022)) were analyzed. Peptides from non-vaccine antigens are highly conserved (98.2-99.3% range) regardless of whether they are recognized by T cells or not (FIG. 5A). However, dominant peptides are enriched in intermediate or conserved peptides (FIG. 5B), and non-reactive peptides are significantly enriched in variable peptides (FIG. 5C). Similar results were noted for peptides derived from aP vaccine antigens (FIGS. 5D-5F), but the analysis significance is limited by the small number of peptides, and the high number of “dominant” peptides.

[0088] The inventors next investigated 22 different genomes of different species of the genus Bordetella. Peptides from non-vaccine antigens have low conserved sequences (74.0-78.2% range) regardless of whether they are recognized by T cells or not (FIG. 5G). As in the case of the strain analysis, dominant peptides are enriched in conserved peptides, while non-reactive or subdominant peptides are enriched in variable peptides (FIGS. 5H-5I). Moreover, peptides from aP vaccine antigens are not conserved between species (<66.6%) with all peptides irrespectively of the T cell reactivity falling in the variable category (FIGS. 5J-5L). Overall, while peptides associated with sequence variations are less likely to be recognized, sequence conservation is high among different BP strains and low in different Bordetella species, and therefore sequence conservation does not appear to be a major driver of BP CD4+ T cell immunogenicity.

### Example 9

[0089] Phenotypes associated with recognition of non-aP vaccine antigens.

[0090] To characterize responses to the highest reactive non-aP vaccine antigens identified in this study, the inventors generated a pool encompassing 170 different epitopes (Dominant peptides tested positive in at least 2 donors with >0.06% total CD4+ T cell response), and hereafter denominated PT(E)R (Table 2). As control, the inventors used a previously described MP (Bancroft et al., 2016; da Silva Antunes et al., 2018), containing epitopes exclusive from aP vaccine antigens [PT(E)VAC]. These MPs were tested in replicates of 3 independent experiments with PBMC from 20 subjects (10 aP and 10 wP). As expected, the PT(E)R pool yielded vigorous responses, which were not statistically different when compared to the PT(E)VAC pool in the AIM assay (FIG. 6A), with 90% and 75% of donor recognition, respectively.

[0091] Previous studies highlight differences in polarization patterns of responses to the aP vaccine antigens as a function of the original priming, with aP original vaccination being associated with a Th2 pattern and wP priming being associated with a Th1 profile (da Silva Antunes et al., 2018; da Silva Antunes et al., 2020). Here the inventors addressed whether this difference in polarization was also noted with the non-aP vaccine antigens. Accordingly, CD4+ T cell responses to PT(E)VAC and PT(E)R were measured by intracellular cytokine staining (ICS) with phenotypic assessment of IFNγ, TNFα, IL-2 and IL-4 expression among intracellular CD154+ (CD40L) cells in PBMC from an additional cohort of 40 subjects (20 aP and 20 wP). A MP against the ubiquitous antigen CMV was used as an additional control of specificity.

[0092] As shown in FIG. 6B, antigen-specific CD4+ T cell responses to PT(E)VAC and PT(E)R pools were also readily detected in terms of cytokine secretion with 95% and 90% of donor recognition, respectively. Interestingly, while responses to the aP vaccine antigens were Th1 polarized in wP-primed donors and Th2 polarized in aP-primed donors (FIG. 6C), responses to the non-aP vaccine antigen pool PT(E)R were not polarized as function of priming vaccination in childhood, similar to CMV responses, which are known to be highly Th1 polarized (FIG. 6C). Overall these results show that the Th2 polarization is specific to the aP vaccine antigens, in individuals originally primed with aP vaccine.

### Example 10

[0093] CD4+ T cell responses against individual non-aP vaccine antigens.

[0094] To further characterize responses to the most immunodominant non-aP vaccine antigens identified (Table 1), the inventors synthetized 15 MPs using sets of peptides (15mers) overlapping by 10a.a. and encompassing the entire sequence of each individual antigen (ANT1-ANT15). This unbiased approach allowed us to determine the overall reactivity of each antigen irrespectively of the number of predicted peptides selected and tested from the initial screening library. As control, the inventors used the above-mentioned PT(E)VAC peptide pool. These MPs were tested in replicates of 3 independent experiments with PBMC from 20 subjects (10 aP and 10 wP) using the AIM assay.

[0095] To capture the overall response of each donor to all the 15 antigens, the magnitude of the individual MPs was combined (PT(0)1-15). The results in FIG. 7A show that responses to PT(0)1-15 were robust and detected in all of donors, and yielded similar magnitude and donor recognition as PT(E)VAC. Among non-aP vaccine antigens, Maltose alpha-D-glucosyltransferase; MTHase (ANT3), BrKA (ANT8) and ACT (ANT9) were the most reactive antigens, with 35%, 50% and 70% of donors responding, respectively. These results could be in part attributed to the fact that in general, the most reactive antigens have the longest sequences (FIG. 14). Interestingly, responses to the different antigens were detected irrespectively of the vaccine administered in childhood immunization (not shown).

[0096] Detection of antigen-specific CD4+ T cell responses to the 15 non-aP vaccine antigens was also performed by ICS, in a subset of the previous cohort of 40. Similar results to the AIM assay (FIG. 7A) were observed for cytokine responses to all antigens combined (PT(0)1-15), and to the 15 individual antigens (FIG. 7B) with 50%, 41% and 71% of positive donor response for MTHase (ANT3), BrKA (ANT8) and ACT (ANT9), respectively. Consistent with the results shown above for the non-aP vaccine antigen pool PT(E)R, responses to non-aP vaccine individual antigens were not polarized as function of priming childhood vaccination (FIG. 7C). These results confirm that responses to non-aP vaccine antigens are not Th2 polarized.

### Example 11

[0097] Knowledge regarding human T cell responses to BP was previously largely limited to the four antigens contained in the aP vaccine, despite growing awareness of the importance of T cells in the control and prevention of symptomatic whopping cough disease (Chasaide and Mills, 2020; Fedele et al., 2015; Lambert et al., 2021; Solans and Locht, 2018; Warfel et al., 2014). Herein, the inventors provide the first in-depth characterization of human CD4+ T cell responses to the whole BP proteome, spanning over 3,000 different ORFs.

[0098] BP specific-CD4+ T cells in healthy young adults immunized with different pertussis vaccines are associated with a previously unrecognized and remarkable large breadth of responses. Tens of ORFs and hundreds of different peptides were recognized in the 40 donors studied. This remarkable large breadth of T cell responses parallels the large breadth of responses observed for another bacterial species (Mycobacterium tuberculosis: (Lindestam Arlehamn et al., 2013)), and it is a testament to the fact that T cell responses have the capacity to recognize most if not all foreign proteins.

[0099] Surprisingly, no differences were observed between wP- and aP-primed vaccinees in magnitude, breadth, or antigen repertoire of responses in both non-aP and aP vaccine antigens, indicating that the childhood priming does not drive the repertoire features detected in young adults. The broad responses to non-aP vaccine antigens in adults is consistent with the notion that repeated exposure and/or colonization might be a prevalent occurrence throughout lifetime as suggested by the high prevalence of asymptomatic BP infections in human populations (de Melker et al., 2006; Heininger et al., 2004b; Naeini et al., 2015; Palazzo et al., 2016; van Schuppen et al., 2022; Zhang et al., 2014) and of adults being a reservoir for ongoing circulation of BP (Blanchard-Rohner, 2022). Lastly, this hypothesis is further supported by the evidences in animal studies performed in baboon and mouse models that established that aP vaccination does not control infection, only symptomatic disease (Warfel et al., 2014; Wilk et al., 2019; Zeddeman et al., 2020). Since none of the donors participating in this study reported having experienced clinical whooping cough disease, the observed heterogeneity might reflect asymptomatic or sub-clinical infections.

[0100] While as expected, all the known aP vaccine antigens were re-identified, they accounted for a relatively minor fraction of the total CD4+ T cell response, and these studies identified fifteen different antigens that were recognized as vigorously as the aP vaccine antigens. These antigens included BrkA and ACT, known to play important roles in the pathogenesis of pertussis, as dominant targets of human T cell responses. Other antigens were associated with regulation of gene expression (LysR family transcriptional regulator) or virulence (virulence sensor protein BvgS, YihY/virulence factor BrkB family protein or Filamentous hemagglutinin transporter protein FhaC, that mediates the secretion of aP vaccine antigen FHA). Among other highly reactive targets the inventors found several antigens associated with Type I-IV secretion systems, a machinery system that translocate proteins and virulence factors (e.g. PtTox) from the cytoplasm to extracellular environment (Park et al., 2015). Indeed, virulence factors and bacterial secretory systems appear to be frequently recognized by human T cell responses, possibly reflective of their role in infection (Lindestam Arlehamn et al., 2013; Rolan and Tsolis, 2008; Saikh et al., 2006; Shepherd and McLaren, 2020).

[0101] What is the relation between the targets of CD4+ T cell and antibody recognition? The ACT antigen is also dominantly recognized by antibody responses un humans (Arciniega et al., 1991; Cherry et al., 2004), and additional CD4+ T cell antigens identified in this study are immunodominant for antibodies in mouse models (GroEL, EfG, and ribosomal proteins; (Raeven et al., 2015). In addition, a recent antigen discovery study using serum from convalescent baboons identified a total of 314 antigens targets of antibody responses, including several dominant targets of T cell responses in this study, such as BvgS, FhaC, Membrane protein insertase YidC, BrkA, and ACT. Because of the deterministic linkage between 10 antibody and CD4+ T cell responses for large pathogens (Sette et al., 2008), the inventors' findings identify antigens that are targets of both antibody and T cell reactivity and should be considered in the design of upcoming pertussis vaccines.

[0102] The identification of new CD4+ T cell epitopes and immunodominant antigens not included in the aP vaccine, enabled us to develop tools to detect and characterize BP non-aP vaccine responses. While responses to the aP antigens were Th1 polarized in wP-primed donors and Th2 polarized in aP-primed donors, responses to non-aP antigens were not polarized as function of childhood priming vaccination. These results indicate that a Th2 phenotype is specific to aP vaccine antigens in individuals originally primed with aP vaccine. These results also suggest that the dominant non-aP vaccine antigens identified in this study could be used to induce a more balanced Th1/Th2 imprinting of memory BP responses even in subjects in which a dominant, long lasting Th2 response to the aP antigens is imprinted as a result of childhood aP vaccination.

[0103] Remarkably each individual tended to recognize a partially overlapping yet unique set of antigenic and epitope targets. The reasons for this donor-donor heterogeneity are not apparent, but might include past infection history, differences in HLA types, and influences of the microbiome on the repertoire of recognition. In this context, conservation amongst different Bordetella species is not a major driver of the dominantly recognized epitopes as in general, peptide homology or sequence conservation between Bordetella isolates was low, with only a small fraction (<3%) of the highly conserved peptides associated with dominant responses. In addition, the majority of the Bordetella isolates studied are species non-infectious to humans, and therefore a high sequence homology devoid of relevance.

[0104] These newly established peptide pools will aid the research and characterization of CD4+ and CD8+ T cell responses in BP infection and controlled human BP infection/colonization initiatives in humans, and can be incorporated into novel compositions, therapeutics, and diagnostics as disclosed herein, including but not limited to whole-cell based vaccines candidates (Buddy Creech et al., 2022; Chasaide and Mills, 2020; Diks et al., 2023). Herein, the inventors characterized CD4+ T cells responses directly ex vivo using high-throughput screening methodology, thus introducing minimal physiological perturbations and bias as a result of in vitro clonal expansion, and in combination with bioinformatic predictions of potential dominant epitopes binding HLA class II. This approach should be generally applicable to the study of T cell immune responses to other complex bacterial pathogens. Altogether, the fact that similar and broad repertoires are detected in aP-versus wP-originally primed subjects, is compatible with the notion that asymptomatic infections occur similarly in the two groups. This appears to be independent of the reported difference between aP versus wP-originally primed subjects in terms of protection from symptomatic disease.

[0105] Study subjects. 62 healthy adults from San Diego, USA were recruited. All participants provided written informed consent for participation and relevant clinical medical history was collected and evaluated by the clinical coordinators through recording dates, type of pertussis vaccine, vaccination schedule, and questionnaires including if they ever experienced whooping cough disease. Individuals who had been diagnosed with BP infection at any given time in their life were excluded. All donors were from the San Diego area, and originally vaccinated with either DTwP or DTaP in childhood and followed the recommended vaccination regimen (which is also necessary for enrollment in the California school system), which entails a Tdap booster immunization at 11-12 years and then every 10 years. In both groups, male and female subjects were included equally.

[0106] PBMC isolation. PBMCs were isolated from whole blood by density gradient centrifugation according to manufacturer instructions (Ficoll-Hypaque, Amersham Biosciences, Uppsala, Sweden) and cryopreserved for further analysis.

[0107] Peptide prediction, synthesis, library assembly and pool preparation. Peptide selection was derived from either BP whole-genome predictions from the Tohama I strain or from a set of 256 unique open reading frames (ORF) from the recent clinical isolate D420 strain and not contained in Tohama I strain. These 256 unique ORFs have been identified in the lab of Dr. Tod Merkel (unpublished findings or Ref?). BP genome-wide identification from Tohama I strain was performed by scanning for the presence of predicted HLA class II promiscuous binding peptides. MHC-peptide binding predictions were performed using publicly available tools hosted by the Immune Epitope Database (IEDB) Analysis Resource (Dhanda et al., 2019). Specifically, the prediction of peptides was established by the 7-allele HLA class II restricted method and by using peptides 15 residues in length and overlapping by 10 residues. Additional filtering using an epitope cluster analysis tool was performed to include unique peptides across all proteins with median percentile rank (cut-off of 10) predicted peptides for each antigen or at least 2 peptides per ORF. To remove redundant peptides, all peptides overlapping by 9 residues or more were placed into “variant clusters”. The most commonly occurring peptide was marked as the “representative” and the less-common peptides were marked as “variants”. Variants in each cluster were sorted by their alignment-start position and only synthesized once. Using these combined approaches, the inventors selected and synthesized a total of 24,876 peptides, spanning 3,305 unique ORFs. The peptides were pooled and organized into a library of 1,064 MesoPools (MS) composed of 24 individual peptides, and also a library of 133 MegaPools (MP) composed of 8 MS. All individual peptides were synthesized by Mimotopes (Victoria, Australia) and resuspended to a final concentration of 1 mg/mL in DMSO.

[0108] Whole genome screening study design. CD4+ T cell reactivity was assayed directly ex vivo using an Activation induced marker (AIM) assay previously validated for BP epitope discovery (da Silva Antunes et al., 2020). A summary of the screening strategy is shown in FIG. 8. PBMCs from each donor were tested with sets of the same peptide library After screening and identification of library pools that resulted in AIM+ reactive responses for each donor and based on cell availability the inventors deconvoluted the top 30 MP and top 34 MS for each individual donor, which in preliminary analysis was shown to capture ≥75% and ≥90% of the total MP and MS library response, respectively. Overall, for each donor, an average of 764 peptides of the total library were tested and the position of each individual epitope identified mapped to the aligned BP genome using the Tohama I and D420 BP strains as reference. The total magnitude of response and localization of each recognized ORF/antigen across the entire cohort was performed by summing all the reactivity of individual epitopes across all donors.

[0109] FIGS. 9A-9B show the immunodominance is associated with both magnitude and donor recognition. (FIG. 9A) Overall map of CD4+ T cell responses at antigen (ORF) level by percent of total magnitude (black bars, left axis) or percent of donor recognition (grey bars, right axis), across the entire cohort (n=40). Each bar represents an individual ORF identified across the aligned BP genome, using the Tohama I and D420 BP strains as reference. Dotted line represents a frequency of recognition of 5%. (FIG. 9B) Graph shows correlation between percentages of total magnitude and donor recognition. Each circle represents an individual ORF. R and p value expresses Spearman's rank correlation coefficient test.

[0110] Generation of peptide pools for non-aP vaccine antigens. To validate and characterize responses to the most dominant non-aP vaccine epitopes identified in this study, the inventors generated a pool encompassing 170 peptides [PT(E)R](Table 2) by selecting the top immunodominant epitopes recognized in at least 2 donors. To test the reactivity of the 15-defined immunodominant non-aP vaccine antigens, the inventors generated MPs of 15-mer peptides overlapping by 10 a.a. spanning the entire sequences of each individual antigen [PT(O)ANT1-15]. As a control, the inventors also studied antigen-specific responses against a previously described MP (Bancroft et al., 2016; da Silva Antunes et al., 2018), containing epitopes exclusive from aP vaccine antigens [PT(E)VAC] and from the ubiquitous pathogen CMV (Yu et al., 2022). Individual peptides were synthesized by TC peptide lab (San Diego, CA).

[0111] Activation Induced Marker (AIM) and Intracellular staining (ICS) assays. CD4+ T cell reactivity was assayed directly ex vivo using an Activation induced marker (AIM) assay utilizing the combination of markers OX40+CD25+ as previously described (Dan et al., 2016). This assay detects cells that are activated as a result of antigen-specific stimulation by staining antigen-experienced CD4+ T cells for TCR-dependent upregulation of OX40 and CD25 (AIM25) after an optimal time of 18-24 h of culture. Briefly, cryopreserved PBMCs were thawed, and 1×10⁶ cells/condition were immediately cultured together with peptide pools (2 μg/mL), individual peptides (10 μg/mL), or PHA (10 μg/mL; Roche, San Diego, CA) and DMSO as positive and negative controls, respectively, in 5% human serum (Gemini Bio-Products) for 24 h. All samples were acquired on a ZE5 cell analyzer (Biorad laboratories, Hercules, CA) and analyzed with FlowJo software (Tree Star, Ashland, OR). AIM+ CD4+ T cells data were calculated as percentage of cells per million of CD4+ T cells. Background subtracted data were derived by subtracting the % of AIM+ cells percentage after each MP stimulation from the average of triplicate wells stimulated with DMSO. The Stimulation Index (SI) was calculated by dividing the % of AIM+ cells after peptide pool stimulation with the average % of AIM⁺ cells in the negative DMSO control. A positive response was defined as SI greater than 2 and AIM+ response above the threshold of positivity after background subtraction. The threshold of positivity (0.0285%) was calculated based on the median twofold standard deviation of T cell reactivity in negative DMSO controls according to previous published studies (da Silva Antunes et al., 2020; Tarke et al., 2022).

[0112] The intracellular cytokine staining (ICS) assay was performed as previously described (Tarke et al., 2022). PBMCs were cultured in the presence of antigen-specific MPs [1 mg/ml] in 96-well U-bottom plates at a concentration of 2×10⁶ PBMC per well. As a negative control, an equimolar amount of DMSO was used to stimulate the cells in triplicate wells and PHA (1 mg/ml) stimulated cells were used as positive controls. After incubation for 24 hours at 37° C. in 5% CO2, cells were incubated for additional 4 hours after adding Golgi-Plug containing brefeldin A, Golgi-Stop containing monensin (BD Biosciences, San Diego, CA) together with CD137 APC antibody (2:100; Biolegend, San Diego, CA). Cells were then stained on their surface for 30 min at 4° C. in the dark, after that fixed with 1% of paraformaldehyde (Sigma-Aldrich, St. Louis, MO), permeabilized, and blocked for 15 minutes followed by intracellular staining for 30 min at room temperature. All samples were acquired on a ZE5 5-laser cell analyzer (Biorad laboratories, Hercules, CA) and analyzed with FlowJo software (Tree Star, Ashland, OR). Specifically, lymphocytes were gated, followed by single cells determination. T cells were gated for being positive to CD3 and negative for a Dump channel including in the same colors CD14, CD19 and Live/Dead staining. CD3+CD4+ were further gated based on a combination of each cytokine (IFNγ, TNFα, IL-2, and IL-4) with CD40L (CD154). The total cytokine response and T cell functionality was calculated from Boolean gating of single cytokines that was applied to CD3+CD4+ cells. The background was removed from the data by subtracting the average of the % of Cytokine+ cells plated in triplicate wells stimulated with DMSO. CD4+ T cell cytokine responses were background subtracted individually and found positive only if fulfilling the criteria of an SI greater than 2 and above a threshold of positivity (TP) of 0.002% for overall CD4+Cytokine+ cells. The TP for ICS was considered to be a positive response based on the median twofold standard deviation of T cell reactivity in negative DMSO controls.

[0113] The detailed information of the gating strategy is listed in FIG. 11. Gates were drawn relative to the negative and positive controls for each donor.

[0114] Conservation analysis. The degree of conservation was performed amongst 20 strains representing different clades of BP or amongst 22 different species of the genus Bordetella. A bioinformatic analysis was conducted to ascertain the percent of homology for each individual peptide across all the different strains and species. Peptides were then divided in subsets according to their immunogenicity or degree of conservation in different isolates or related species. In terms of immunogenicity, peptides were arbitrarily divided in not recognized, subdominant (recognized in 1 donor), or dominant (recognized in >=2 donors). In terms of conservation, peptides were classified as variable (<75% of homology), intermediate (75-95% of homology), or conserved (>95% of homology). Finally, peptides were further segregated as derived from aP vaccine antigens, or from non-aP vaccine antigens. Results were plotted as geomean of percent homology or relative percent of the number of peptides in each subset.

[0115] Statistical analysis. Comparisons between groups were performed using the nonparametric two-tailed, and unpaired Mann-Whitney test or Kruskal-Wallis test adjusted with Dunn's test for multiple comparisons. Spearman's rank correlation coefficient test was used for association analysis. Prism 8.0.1 (GraphPad, San Diego, CA, USA) was used for these calculations. Values pertaining to significance and correlation coefficient (R) are noted in the respective figure, and P<0.05 defined as statistically significant.

[0116] Study approval. This study was performed with approvals from the Institutional Review Board at La Jolla Institute for Immunology (protocols; VD-101-0513 and VD-059-0813). All participants provided written informed consent for participation and clinical medical history was collected and evaluated.

### REFERENCES

[0117] Arciniega, J. L., Hewlett, E. L., Johnson, F. D., Deforest, A., Wassilak, S. G., Onorato, I. M., Manclark, C. R., and Burns, D. L. (1991). Human serologic response to envelope-associated proteins and adenylate cyclase toxin of Bordetella pertussis. J Infect Dis 163, 135-142.
[0118] Ausiello, C. M., Mascart, F., Corbiere, V., and Fedele, G. (2019). Human Immune Responses to Pertussis Vaccines. Adv Exp Med Biol 1183, 99-113.
[0119] Bancroft, T., Dillon, M. B., da Silva Antunes, R., Paul, S., Peters, B., Crotty, S., Lindestam Arlehamn, C. S., and Sette, A. (2016). Th1 versus Th2 T cell polarization by whole-cell and acellular childhood pertussis vaccines persists upon re-immunization in adolescence and adulthood. Cell Immunol 304-305, 35-43.
[0120] Blanchard-Rohner, G. (2022). Novel approaches to reactivate pertussis immunity. Expert Rev Vaccines 21, 1787-1797.
[0121] Buddy Creech, C., Jimenez-Truque, N., Kown, N., Sokolow, K., Brady, E. J., Yoder, S., Solovay, K., Rubin, K., Noviello, S., Hensel, E., et al. (2022). Safety and immunogenicity of live, attenuated intranasal Bordetella pertussis vaccine (BPZE1) in healthy adults. Vaccine 40, 6740-6746.
[0122] Bui, H. H., Sidney, J., Li, W., Fusseder, N., and Sette, A. (2007). Development of an epitope conservancy analysis tool to facilitate the design of epitope-based diagnostics and vaccines. BMC Bioinformatics 8, 361.
[0123] CDC (2023). Pertusis (Whooping Cough).
[0124] Chasaide, C. N., and Mills, K. H. G. (2020). Next-Generation Pertussis Vaccines Based on the Induction of Protective T Cells in the Respiratory Tract. Vaccines (Basel) 8.
[0125] Chen, Z., and He, Q. (2017). Immune persistence after pertussis vaccination. Hum Vaccin Immunother 13, 744-756.
[0126] Cherry, J. D., Xing, D. X., Newland, P., Patel, K., Heininger, U., and Corbel, M. J. (2004). Determination of serum antibody to Bordetella pertussis adenylate cyclase toxin in vaccinated and unvaccinated children and in children and adults with pertussis. Clin Infect Dis 38, 502-507.
[0127] Chit, A., Zivaripiran, H., Shin, T., Lee, J. K. H., Tomovici, A., Macina, D., Johnson, D. R., Decker, M. D., and Wu, J. (2018). Acellular pertussis vaccines effectiveness over time: A systematic review, meta-analysis and modeling study. PLoS One 13, e0197970.
[0128] Consortium, P. (2019). PERISCOPE: road towards effective control of pertussis. Lancet Infect Dis 19, e179-e186.
[0129] da Silva Antunes, R., Babor, M., Carpenter, C., Khalil, N., Cortese, M., Mentzer, A. J., Seumois, G., Petro, C. D., Purcell, L. A., Vijayanand, P., et al. (2018). Th1/Th17 polarization persists following whole-cell pertussis vaccination despite repeated acellular boosters. J Clin Invest 128, 3853-3865.
[0130] da Silva Antunes, R., Quiambao, L. G., Soldevila, F., Sutherland, A., Peters, B., and Sette, A. (2021). Lack of evidence supporting a role of IFN-beta and TGF-beta in differential polarization of Bordetella pertussis specific-T cell responses. Cytokine 137, 155313.
[0131] da Silva Antunes, R., Quiambao, L. G., Sutherland, A., Soldevila, F., Dhanda, S. K., Armstrong, S. K., Brickman, T. J., Merkel, T., Peters, B., and Sette, A. (2020). Development and Validation of a Bordetella pertussis Whole-Genome Screening Strategy. J Immunol Res 2020, 8202067.
[0132] Dalby, T., Petersen, J. W., Harboe, Z. B., and Krogfelt, K. A. (2010). Antibody responses to pertussis toxin display different kinetics after clinical Bordetella pertussis infection than after vaccination with an acellular pertussis vaccine. J Med Microbiol 59, 1029-1036.
[0133] Damron, F. H., Barbier, M., Dubey, P., Edwards, K. M., Gu, X. X., Klein, N. P., Lu, K., Mills, K. H. G., Pasetti, M. F., Read, R. C., et al. (2020). Overcoming Waning Immunity in Pertussis Vaccines: Workshop of the National Institute of Allergy and Infectious Diseases. J Immunol 205, 877-882.
[0134] Dan, J. M., Lindestam Arlehamn, C. S., Weiskopf, D., da Silva Antunes, R., Havenar-Daughton, C., Reiss, S. M., Brigger, M., Bothwell, M., Sette, A., and Crotty, S. (2016). A Cytokine-Independent Approach To Identify Antigen-Specific Human Germinal Center T Follicular Helper Cells and Rare Antigen-Specific CD4+ T Cells in Blood. J Immunol 197, 983-993.
[0135] de Melker, H. E., Versteegh, F. G., Schellekens, J. F., Teunis, P. F., and Kretzschmar, M. (2006). The incidence of Bordetella pertussis infections estimated in the population from a combination of serological surveys. J Infect 53, 106-113.
[0136] Dhanda, S. K., Mahajan, S., Paul, S., Yan, Z., Kim, H., Jespersen, M. C., Jurtz, V., Andreatta, M., Greenbaum, J. A., Marcatili, P., et al. (2019). IEDB-AR: immune epitope database-analysis resource in 2019. Nucleic Acids Res 47, W502-W506.
[0137] Diavatopoulos, D. A., and Edwards, K. M. (2017). What Is Wrong with Pertussis Vaccine Immunity? Why Immunological Memory to Pertussis Is Failing. Cold Spring Harb Perspect Biol 9.
[0138] Diks, A. M., de Graaf, H., Teodosio, C., Groenland, R. J., de Mooij, B., Ibrahim, M., Hill, A. R., Read, R. C., van Dongen, J. J., and Berkowska, M. A. (2023). Distinct early cellular kinetics in participants protected from colonization upon Bordetella pertussis challenge. J Clin Invest.
[0139] DiVenere, A. M., Amengor, D., Silva, R. P., Goldsmith, J. A., McLellan, J. S., and Maynard, J. A. (2022). Blockade of the Adenylate Cyclase Toxin Synergizes with Opsonizing Antibodies to Protect Mice against Bordetella pertussis. mBio 13, e0152722.
[0140] Domenech de Celles, M., Rohani, P., and King, A. A. (2019). Duration of Immunity and Effectiveness of Diphtheria-Tetanus-Acellular Pertussis Vaccines in Children. JAMA Pediatr 173, 588-594.
[0141] Elder, K. D., and Harvill, E. T. (2004). Strain-dependent role of BrkA during Bordetella pertussis infection of the murine respiratory tract. Infect Immun 72, 5919-5924.
[0142] Esposito, S., Stefanelli, P., Fry, N. K., Fedele, G., He, Q., Paterson, P., Tan, T., Knuf, M., Rodrigo, C., Weil Olivier, C., et al. (2019). Pertussis Prevention: Reasons for Resurgence, and Differences in the Current Acellular Pertussis Vaccines. Front Immunol 10, 1344.
[0143] Fedele, G., Cassone, A., and Ausiello, C. M. (2015). T-cell immune responses to Bordetella pertussis infection and vaccination. Pathog Dis 73.
[0144] Felice, A. G., Santos, L. N. Q., Kolossowski, I., Zen, F. L., Alves, L. G., Rodrigues, T. C. V., Prado, L. C. S., Jaiswal, A. K., Tiwari, S., Miranda, F. M., et al. (2022). Comparative genomics of Bordetella pertussis and prediction of new vaccines and drug targets. J Biomol Struct Dyn 40, 10136-10152.
[0145] Gregg, K. A., Wang, Y., Warfel, J., Schoenfeld, E., Jankowska, E., Cipollo, J. F., Mayho, M., Boinett, C., Prasad, D., Brickman, T. J., et al. (2022). “Antigen Discovery for Next-Generation Pertussis Vaccines using Immunoproteomics and Transposon Directed Insertion Sequencing”. J Infect Dis.
[0146] Grifoni, A., Weiskopf, D., Ramirez, S. I., Mateus, J., Dan, J. M., Moderbacher, C. R., Rawlings, S. A., Sutherland, A., Premkumar, L., Jadi, R. S., et al. (2020). Targets of T Cell Responses to SARS-CoV-2 Coronavirus in Humans with COVID-19 Disease and Unexposed Individuals. Cell 181, 1489-1501 e1415.
[0147] Heininger, U., Cherry, J. D., and Stehr, K. (2004a). Serologic response and antibody-titer decay in adults with pertussis. Clin Infect Dis 38, 591-594.
[0148] Heininger, U., Kleemann, W. J., Cherry, J. D., and Sudden Infant Death Syndrome Study, G. (2004b). A controlled study of the relationship between Bordetella pertussis infections and sudden unexpected deaths among German infants. Pediatrics 114, e9-15.
[0149] Higgs, R., Higgins, S. C., Ross, P. J., and Mills, K. H. (2012). Immunity to the respiratory pathogen Bordetella pertussis. Mucosal Immunol 5, 485-500.
[0150] Jenkinson, D. (1988). Duration of effectiveness of pertussis vaccine: evidence from a 10 year community study. Br Med J (Clin Res Ed) 296, 612-614.
[0151] Kandeil, W., Atanasov, P., Avramioti, D., Fu, J., Demarteau, N., and Li, X. (2019). The burden of pertussis in older adults: what is the role of vaccination? A systematic literature review. Expert Rev Vaccines 18, 439-455.
[0152] Kapil, P., and Merkel, T. J. (2019). Pertussis vaccines and protective immunity. Curr Opin Immunol 59, 72-78.
[0153] Klein, N. P., Bartlett, J., Fireman, B., Rowhani-Rahbar, A., and Baxter, R. (2013). Comparative effectiveness of acellular versus whole-cell pertussis vaccines in teenagers. Pediatrics 131, e1716-1722.
[0154] Kuehn, B. M. (2021). Resurgence of Pertussis Linked With Switch to Acellular Vaccine. JAMA 326, 300.
[0155] Lambert, E. E., van Twillert, I., Beckers, L., Poelen, M. C. M., Han, W. G. H., Pieren, D. K. J., and van Els, C. (2021). Reduced Bordetella pertussis-specific CD4(+) T-Cell Responses at Older Age. Front Aging 2, 737870.
[0156] Le, T., Cherry, J. D., Chang, S. J., Knoll, M. D., Lee, M. L., Barenkamp, S., Bernstein, D., Edelman, R., Edwards, K. M., Greenberg, D., et al. (2004). Immune responses and antibody decay after immunization of adolescents and adults with an acellular pertussis vaccine: the APERT Study. J Infect Dis 190, 535-544.
[0157] Lindestam Arlehamn, C. S., Gerasimova, A., Mele, F., Henderson, R., Swann, J., Greenbaum, J. A., Kim, Y., Sidney, J., James, E. A., Taplitz, R., et al. (2013). Memory T cells in latent Mycobacterium tuberculosis infection are directed against three antigenic islands and largely contained in a CXCR3+CCR6+ Th1 subset. PLoS Pathog 9, e1003130.
[0158] Macina, D., and Evans, K. E. (2021). Pertussis in Individuals with Co-morbidities: A Systematic Review. Infect Dis Ther 10, 1141-1170.
[0159] McAlister, S. M., van den Biggelaar, A. H. J., Woodman, T. L., Hutton, H., Thornton, R. B., and Richmond, P. C. (2021). An observational study of antibody responses to a primary or subsequent pertussis booster vaccination in Australian healthcare workers. Vaccine 39, 1642-1651.
[0160] Moon, K., Bonocora, R. P., Kim, D. D., Chen, Q., Wade, J. T., Stibitz, S., and Hinton, D. M. (2017). The BvgAS Regulon of Bordetella pertussis. mBio 8.
[0161] Naeini, A. E., Zaman, N., Khorvash, F., Naeini, S E., Khodadadi, H. A., Mokhtari, M., and Koushki, A. M. (2015). Does working in hospital increases seroprevalence and carrier state against Bordetella pertussis? Adv Biomed Res 4, 194.
[0162] Oseroff, C., Sidney, J., Kotturi, M. F., Kolla, R., Alam, R., Broide, D. H., Wasserman, S. I., Weiskopf, D., McKinney, D. M., Chung, J. L., et al. (2010). Molecular determinants of T cell epitope recognition to the common Timothy grass allergen. J Immunol 185, 943-955.
[0163] Palazzo, R., Carollo, M., Fedele, G., Rizzo, C., Rota, M. C., Giammanco, A., Iannazzo, S., Ausiello, C. M., and Sero-Epidemiology Working, G. (2016). Evidence of increased circulation of Bordetella pertussis in the Italian adult population from seroprevalence data (2012-2013). J Med Microbiol 65, 649-657.
[0164] Park, J., Zhang, Y., Chen, C., Dudley, E. G., and Harvill, E. T. (2015). Diversity of secretion systems associated with virulence characteristics of the classical bordetellae. Microbiology (Reading) 161, 2328-2340.
[0165] Paul, S., Lindestam Arlehamn, C. S., Scriba, T. J., Dillon, M. B., Oseroff, C., Hinz, D., McKinney, D. M., Carrasco Pro, S., Sidney, J., Peters, B., et al. (2015). Development and validation of a broad scheme for prediction of HLA class II restricted T cell epitopes. J Immunol Methods 422, 28-34.
[0166] Plotkin, S. A. (2018). Composition of pertussis vaccine given to infants determines long-term T cell polarization. J Clin Invest 128, 3742-3744.
[0167] Raeven, R. H., van der Maas, L., Tilstra, W., Uittenbogaard, J. P., Bindels, T. H., Kuipers, B., van der Ark, A., Pennings, J. L., van Riet, E., Jiskoot, W., et al. (2015). Immunoproteomic Profiling of Bordetella pertussis Outer Membrane Vesicle Vaccine Reveals Broad and Balanced Humoral Immunogenicity. J Proteome Res 14, 2929-2942.
[0168] Rolan, H. G., and Tsolis, R. M. (2008). Inactivation of the type IV secretion system reduces the Th1 polarization of the immune response to Brucella abortus infection. Infect Immun 76, 3207-3213.
[0169] Saikh, K. U., Kissner, T. L., Dyas, B., Tropea, J. E., Waugh, D. S., and Ulrich, R. G. (2006). Human cytolytic T cell recognition of Yersinia pestis virulence proteins that target innate immune responses. J Infect Dis 194, 1753-1760.
[0170] Saso, A., Kampmann, B., and Roetynck, S. (2021). Vaccine-Induced Cellular Immunity against Bordetella pertussis: Harnessing Lessons from Animal and Human Studies to Improve Design and Testing of Novel Pertussis Vaccines. Vaccines (Basel) 9.
[0171] Sette, A., Moutaftsi, M., Moyron-Quiroz, J., McCausland, M. M., Davies, D. H., Johnston, R. J., Peters, B., Rafii-El-Idrissi Benhnia, M., Hoffmann, J., Su, H. P., et al. (2008). Selective CD4+ T cell help for antibody responses to a large viral pathogen: deterministic linkage of specificities. Immunity 28, 847-858.
[0172] Shepherd, F. R., and McLaren, J. E. (2020). T Cell Immunity to Bacterial Pathogens: Mechanisms of Immune Control and Bacterial Evasion. Int J Mol Sci 21.
[0173] Solans, L., and Locht, C. (2018). The Role of Mucosal Immunity in Pertussis. Front Immunol 9, 3068.
[0174] Tarke, A., Coelho, C. H., Zhang, Z., Dan, J. M., Yu, E. D., Methot, N., Bloom, N. I., Goodwin, B., Phillips, E., Mallal, S., et al. (2022). SARS-CoV-2 vaccination induces immunological T cell memory able to cross-recognize variants from Alpha to Omicron. Cell 185, 847-859 e811.
[0175] Tian, Y., da Silva Antunes, R., Sidney, J., Lindestam Arlehamn, C. S., Grifoni, A., Dhanda, S. K., Paul, S., Peters, B., Weiskopf, D., and Sette, A. (2018). A Review on T Cell Epitopes Identified Using Prediction and Cell-Mediated Immune Models for Mycobacterium tuberculosis and Bordetella pertussis. Front Immunol 9, 2778.
[0176] van der Lee, S., Hendrikx, L. H., Sanders, E. A. M., Berbers, G. A. M., and Buisman, A. M. (2018). Whole-Cell or Acellular Pertussis Primary Immunizations in Infancy Determines Adolescent Cellular Immune Profiles. Front Immunol 9, 51.
[0177] van Schuppen, E., Froberg, J., Venkatasubramanian, P. B., Versteegen, P., de Graaf, H., Holubova, J., Gillard, J., van Gageldonk, P. G. M., Joosten, I., de Groot, R., et al. (2022). Prior exposure to B. pertussis shapes the mucosal antibody response to acellular pertussis booster vaccination. Nat Commun 13, 7429.
[0178] Warfel, J. M., Zimmerman, L. I., and Merkel, T. J. (2014). Acellular pertussis vaccines protect against disease but fail to prevent infection and transmission in a nonhuman primate model. Proc Natl Acad Sci USA 111, 787-792.
[0179] Wearing, H. J., and Rohani, P. (2009). Estimating the duration of pertussis immunity using epidemiological signatures. PLoS Pathog 5, e1000647.
[0180] Westernberg, L., Schulten, V., Greenbaum, J. A., Natali, S., Tripple, V., McKinney, D. M., Frazier, A., Hofer, H., Wallner, M., Sallusto, F., et al. (2016). T-cell epitope conservation across allergen species is a major determinant of immunogenicity. J Allergy Clin Immunol 138, 571-578 e577.
[0181] Wilk, M. M., Borkner, L., Misiak, A., Curham, L., Allen, A. C., and Mills, K. H. G. (2019). Immunization with whole cell but not acellular pertussis vaccines primes CD4 TRM cells that sustain protective immunity against nasal colonization with Bordetella pertussis. Emerg Microbes Infect 8, 169-185.
[0182] Wilkinson, T. M. A., Van den Steen, P., Cheuvart, B., Baudson, N., Dodet, M., Turriani, E., Harrington, L., Meyer, N., Rondini, S., Taddei, L., et al. (2021). Seroprevalence of Bordetella pertussis Infection in Patients With Chronic Obstructive Pulmonary Disease in England: Analysis of the AERIS Cohort. COPD 18, 341-348.
[0183] Wirsing von Konig, C. H., Postels-Multani, S., Bock, H. L., and Schmitt, H. J. (1995). Pertussis in adults: frequency of transmission after household exposure. Lancet 346, 1326-1329.
[0184] Yu, E. D., Narowski, T. M., Wang, E., Garrigan, E., Mateus, J., Frazier, A., Weiskopf, D., Grifoni, A., Premkumar, L., da Silva Antunes, R., et al. (2022). Immunological memory to common cold coronaviruses assessed longitudinally over a three-year period pre-COVID19 pandemic. Cell Host Microbe 30, 1269-1278 e1264.
[0185] Zeddeman, A., van Schuppen, E., Kok, K. E., van Gent, M., Heuvelman, K. J., Bart, M. J, van der Heide, H. G. J., Gillard, J., Simonetti, E., Eleveld, MI., et al. (2020). Effect of FHA and Pm on Bordetella pertussis colonization of mice is dependent on vaccine type and anatomical site. PLoS One 15, e0237394.
[0186] Zhang, Q., Yin, Z., Li, Y., Luo, H., Shao, Z., Gao, Y., Xu, L., Kan, B., Lu, S., Zhang, Y., et al. (2014). Prevalence of asymptomatic Bordetella pertussis and Bordetella parapertussis infections among school children in China as determined by pooled real-time PCR: a cross-sectional study. Scand J Infect Dis 46, 280-287.
[0187] Bancroft, T., Dillon, M. B., da Silva Antunes, R., Paul, S., Peters, B., Crotty, S., Lindestam Arlehamn, C. S., and Sette, A. (2016). Th1 versus Th2 T cell polarization by whole-cell and acellular childhood pertussis vaccines persists upon re-immunization in adolescence and adulthood. Cell Immunol 304-305, 35-43.
[0188] da Silva Antunes, R., Babor, M., Carpenter, C., Khalil, N., Cortese, M., Mentzer, Al., Seumois, G., Petro, C. D., Purcell, L. A., Vijayanand, P., et al. (2018). Th1/Th17 polarization persists following whole-cell pertussis vaccination despite repeated acellular boosters. J Clin Invest 128, 3853-3865.
[0189] da Silva Antunes, R., Quiambao, L. G., Soldevila, F., Sutherland, A., Peters, B., and Sette, A. (2021). Lack of evidence supporting a role of IFN-beta and TGF-beta in differential polarization of Bordetella pertussis specific-T cell responses. Cytokine 137, 155313.
[0190] da Silva Antunes, R., Quiambao, L. G., Sutherland, A., Soldevila, F., Dhanda, S. K., Armstrong, S. K., Brickman, T. J., Merkel, T., Peters, B., and Sette, A. (2020). Development and Validation of a Bordetella pertussis Whole-Genome Screening Strategy. J Immunol Res 2020, 8202067.

### Definitions

[0191] The term “gene” means the segment of DNA involved in producing a protein; it includes regions preceding and following the coding region (leader and trailer) as well as intervening sequences (introns) between individual coding segments (exons). The leader, the trailer as well as the introns include regulatory elements that are necessary during the transcription and the translation of a gene. Further, a “protein gene product” is a protein expressed from a particular gene.

[0192] The word “expression” or “expressed” as used herein in reference to a gene means the transcriptional and/or translational product of that gene. The level of expression of a DNA molecule in a cell may be determined on the basis of either the amount of corresponding mRNA that is present within the cell or the amount of protein encoded by that DNA produced by the cell. The level of expression of non-coding nucleic acid molecules (e.g., sgRNA) may be detected by standard PCR or Northern blot methods well known in the art. See, Sambrook et al., 1989 Molecular Cloning: A Laboratory Manual, 18.1-18.88.

[0193] The term “amino acid” refers to naturally occurring and synthetic amino acids, as well as amino acid analogs and amino acid mimetics that function in a manner similar to the naturally occurring amino acids. Naturally occurring amino acids are those encoded by the genetic code, as well as those amino acids that are later modified, e.g., hydroxyproline, γ-carboxyglutamate, and O-phosphoserine. Amino acid analogs refers to compounds that have the same basic chemical structure as a naturally occurring amino acid, i.e., an a carbon that is bound to a hydrogen, a carboxyl group, an amino group, and an R group, e.g., homoserine, norleucine, methionine sulfoxide, methionine methyl sulfonium. Such analogs have modified R groups (e.g., norleucine) or modified peptide backbones, but retain the same basic chemical structure as a naturally occurring amino acid. Amino acid mimetics refers to chemical compounds that have a structure that is different from the general chemical structure of an amino acid, but that functions in a manner similar to a naturally occurring amino acid. The terms “non-naturally occurring amino acid” and “unnatural amino acid” refer to amino acid analogs, synthetic amino acids, and amino acid mimetics which are not found in nature.

[0194] Amino acids may be referred to herein by either their commonly known three letter symbols or by the one-letter symbols recommended by the IUPAC-IUB Biochemical Nomenclature Commission. Nucleotides, likewise, may be referred to by their commonly accepted single-letter codes.

[0195] The terms “polypeptide,” “peptide” and “protein” are used interchangeably herein to refer to a polymer of amino acid residues, wherein the polymer may, in embodiments, be conjugated to a moiety that does not consist of amino acids. The terms apply to amino acid polymers in which one or more amino acid residue is an artificial chemical mimetic of a corresponding naturally occurring amino acid, as well as to naturally occurring amino acid polymers and non-naturally occurring amino acid polymers. A “fusion protein” refers to a chimeric protein encoding two or more separate protein sequences that are recombinantly expressed as a single moiety.

[0196] Proteins and peptides include isolated and purified forms. Proteins and peptides also include those immobilized on a substrate, as well as amino acid sequences, subsequences, portions, homologues, variants, and derivatives immobilized on a substrate.

[0197] Proteins and peptides can be included in compositions, for example, a pharmaceutical composition. In particular embodiments, a pharmaceutical composition is suitable for specific or non-specific immunotherapy, or is a vaccine composition.

[0198] Isolated nucleic acid (including isolated nucleic acid) encoding the proteins and peptides are also provided. Cells expressing a protein or peptide are further provided. Such cells include eukaryotic and prokaryotic cells, such as mammalian, insect, fungal and bacterial cells.

[0199] Methods and uses and medicaments of proteins and peptides of the invention are included. Such methods, uses and medicaments include modulating immune activity of a cell against a pathogen, for example, a bacteria or bacteria.

[0200] The term “peptide mimetic” or “peptidomimetic” refers to protein-like chain designed to mimic a peptide or protein. Peptide mimetics may be generated by modifying an existing peptide or by designing a compound that mimic peptides, including peptoids and β-peptides.

[0201] “Conservatively modified variants” applies to both amino acid and nucleic acid sequences. With respect to particular nucleic acid sequences, “conservatively modified variants” refers to those nucleic acids that encode identical or essentially identical amino acid sequences. Because of the degeneracy of the genetic code, a number of nucleic acid sequences will encode any given protein. For instance, the codons GCA, GCC, GCG and GCU all encode the amino acid alanine. Thus, at every position where an alanine is specified by a codon, the codon can be altered to any of the corresponding codons described without altering the encoded polypeptide. Such nucleic acid variations are “silent variations,” which are one species of conservatively modified variations. Every nucleic acid sequence herein which encodes a polypeptide also describes every possible silent variation of the nucleic acid. One of skill will recognize that each codon in a nucleic acid (except AUG, which is ordinarily the only codon for methionine, and TGG, which is ordinarily the only codon for tryptophan) can be modified to yield a functionally identical molecule. Accordingly, each silent variation of a nucleic acid which encodes a polypeptide is implicit in each described sequence.

[0202] As to amino acid sequences, one of skill will recognize that individual substitutions, deletions or additions to a nucleic acid, peptide, polypeptide, or protein sequence which alters, adds or deletes a single amino acid or a small percentage of amino acids in the encoded sequence is a “conservatively modified variant” where the alteration results in the substitution of an amino acid with a chemically similar amino acid. Conservative substitution tables providing functionally similar amino acids are well known in the art. Such conservatively modified variants are in addition to and do not exclude polymorphic variants, interspecies homologs, and alleles of the disclosure. The following eight groups each contain amino acids that are conservative substitutions for one another: (1) Alanine (A), Glycine (G); (2) Aspartic acid (D), Glutamic acid (E); (3) Asparagine (N), Glutamine (Q); (4) Arginine (R), Lysine (K); (5) Isoleucine (I), Leucine (L), Methionine (M), Valine (V); (6) Phenylalanine (F), Tyrosine (Y), Tryptophan (W); (7) Serine (S), Threonine (T); and (8) Cysteine (C), Methionine (M) (see, e.g., Creighton, Proteins (1984)).

[0203] A “percentage of sequence identity” is determined by comparing two optimally aligned sequences over a comparison window, wherein the portion of the polynucleotide or polypeptide sequence in the comparison window may comprise additions or deletions (i.e., gaps) as compared to the reference sequence (which does not comprise additions or deletions) for optimal alignment of the two sequences. The percentage is calculated by determining the number of positions at which the identical nucleic acid base or amino acid residue occurs in both sequences to yield the number of matched positions, dividing the number of matched positions by the total number of positions in the window of comparison and multiplying the result by 100 to yield the percentage of sequence identity.

[0204] The terms “identical” or percent “identity,” in the context of two or more nucleic acids or polypeptide sequences, refer to two or more sequences or subsequences that are the same or have a specified percentage of amino acid residues or nucleotides that are the same (i.e., about 60% identity, preferably 65%, 70%, 75%, 80%, 85%, 90%, 91%, 92%, 93%, 94%, 95%, 96%, 97%, 98%, 99%, or higher identity over a specified region, when compared and aligned for maximum correspondence over a comparison window or designated region) as measured using a BLAST or BLAST 2.0 sequence comparison algorithms with default parameters described below, or by manual alignment and visual inspection (see, e.g., NCBI web site ncbi.nlm.nih.gov/BLAST/or the like). Such sequences are then said to be “substantially identical.” This definition also refers to, or may be applied to, the compliment of a test sequence. The definition also includes sequences that have deletions and/or additions, as well as those that have substitutions. As described below, the preferred algorithms can account for gaps and the like. Preferably, identity exists over a region that is at least about 25 amino acids or nucleotides in length, or more preferably over a region that is 50-100 amino acids or nucleotides in length.

[0205] An amino acid or nucleotide base “position” is denoted by a number that sequentially identifies each amino acid (or nucleotide base) in the reference sequence based on its position relative to the N-terminus (or 5-end). Due to deletions, insertions, truncations, fusions, and the like that must be taken into account when determining an optimal alignment, in general the amino acid residue number in a test sequence determined by simply counting from the N-terminus will not necessarily be the same as the number of its corresponding position in the reference sequence. For example, in a case where a variant has a deletion relative to an aligned reference sequence, there will be no amino acid in the variant that corresponds to a position in the reference sequence at the site of deletion. Where there is an insertion in an aligned reference sequence, that insertion will not correspond to a numbered amino acid position in the reference sequence. In the case of truncations or fusions there can be stretches of amino acids in either the reference or aligned sequence that do not correspond to any amino acid in the corresponding sequence.

[0206] The terms “numbered with reference to” or “corresponding to,” when used in the context of the numbering of a given amino acid or polynucleotide sequence, refers to the numbering of the residues of a specified reference sequence when the given amino acid or polynucleotide sequence is compared to the reference sequence.

[0207] The term “multimer” refers to a complex comprising multiple monomers (e.g., a protein complex) associated by noncovalent bonds. The monomers be substantially identical monomers, or the monomers may be different. In embodiments, the multimer is a dimer, a trimer, a tetramer, or a pentamer.

[0208] As used herein, the term “Major Histocompatibility Complex” (MHC) is a generic designation meant to encompass the histocompatibility antigen systems described in different species including the human leucocyte antigens (HLA). Typically, MHC Class I or Class II multimers are well known in the art and include but are not limited to dimers, tetramers, pentamers, hexamers, heptamers and octamers.

[0209] As used herein, the term “MHC/peptide multimer” refers to a stable multimeric complex composed of MHC protein(s) subunits loaded with a peptide of the present invention. For example, an MHC/peptide multimer (also called herein MHC/peptide complex) include, but are not limited to, an MHC/peptide dimer, trimer, tetramer, pentamer or higher valency multimer. In humans there are three major different genetic loci that encode MHC class I molecules (the MHC molecules of the human are also designated human leukocyte antigens (HLA)): HLA-A, HLA-B, HLA-C, e.g., HLA-A*01, HLA-A*02, and HLA-A*11 are examples of different MHC class I alleles that can be expressed from these loci. Non-classical human MHC class I molecules such as HLA-E (homolog of mice Qa-1b) and MICA/B molecules are also encompassed by the present invention. In some embodiments, the MHC/peptide multimer is an HLA/peptide multimer selected from the group consisting of HLA-A/peptide multimer, HLA-B/peptide multimer, HLA-C/peptide multimer, HLA-E/peptide multimer, MICA/peptide multimer and MICB/peptide multimer.

[0210] In humans there are three major different genetic loci that encode MHC class II molecules: HLA-DR, HLA-DP, and HLA-DQ, each formed of two polypeptides, alpha and beta chains (A and B genes). For example, HLA-DQA1*01, HLA-DRB1*01, and HLA-DRB1*03 are different MHC class II alleles that can be expressed from these loci. It should be further noted that non-classical human MHC class II molecules such as HLA-DM and HL-DOA (homolog in mice is H2-DM and H2-O) are also encompassed by the present invention. In some embodiments, the MHC/peptide multimer is an HLA/peptide multimer selected from the group consisting of HLA-DP/peptide multimer, HLA-DQ/peptide multimer, HLA-DR/peptide multimer, HLA-DM/peptide multimer and HLA-DO/peptide multimer.

[0211] An MHC/peptide multimer may be a multimer where the heavy chain of the MHC is biotinylated, which allows combination as a tetramer with streptavidin. MHC-peptide tetramers have increased avidity for the appropriate T cell receptor (TCR) on T lymphocytes. The multimers can also be attached to paramagnetic particles or magnetic beads to facilitate removal of non-specifically bound reporter and cell sorting. Multimer staining does not kill the labelled cells, thus, cell integrity is maintained for further analysis. In some embodiments, the MHC/peptide multimer of the present invention is particularly suitable for isolating and/or identifying a population of CD8+ T cells having specificity for the peptide of the present invention (in a flow cytometry assay).

[0212] The peptides or MHC class I or class II multimer as described herein is particularly suitable for detecting T cells specific for one or more peptides of the present invention. The peptide(s) and/or the MHC/multimer complex of the present invention is particularly suitable for diagnosing Bordetella infection in a subject. For example, the method comprises obtaining a blood or PBMC sample obtained from the subject with an amount of a least peptide of the present invention and detecting at least one T cell displaying a specificity for the peptide. Another diagnostic method of the present invention involves the use of a peptide of the present invention that is loaded on multimers as described above, so that the isolated CD8+ or CD4+ T cells from the subject are brought into contact with the multimers, at which the binding, activation and/or expansion of the T cells is measured. For example, following the binding to antigen presenting cells, e.g., those having the MHC class I or class II multimer, the number of CD8+ and/or CD4+ cells binding specifically to the HLA-peptide multimer may be quantified by measuring the secretion of lymphokines/cytokines, division of the T cells, or standard flow cytometry methods, such as, for example, using fluorescence activated cell sorting (FACS). The multimers can also be attached to paramagnetic ferrous or magnetic beads to facilitate removal of non-specifically bound reporter and cell sorting. The MHC class I or class II peptide multimers as described herein can also be used as therapeutic agents. The peptide and/or the MHC class I or class II peptide multimers of the present invention are suitable for treating or preventing a Bordetella infection in a subject. The MHC Class I or Class II multimers can be administered in soluble form or loaded on nanoparticles.

[0213] The term “antibody” refers to a polypeptide encoded by an immunoglobulin gene or functional fragments thereof that specifically binds and recognizes an antigen. The recognized immunoglobulin genes include the kappa, lambda, alpha, gamma, delta, epsilon, and mu constant region genes, as well as the myriad immunoglobulin variable region genes. Light chains are classified as either kappa or lambda. Heavy chains are classified as gamma, mu, alpha, delta, or epsilon, which in turn define the immunoglobulin classes, IgG, IgM, IgA, IgD and IgE, respectively.

[0214] The phrase “specifically (or selectively) binds” to an antibody or “specifically (or selectively) immunoreactive with,” when referring to a protein or peptide, refers to a binding reaction that is determinative of the presence of the protein or peptide, often in a heterogeneous population of proteins and other biologics. Thus, under designated immunoassay conditions, the specified antibodies bind to a particular protein at least two times the background and more typically more than 10 to 100 times background. Specific binding to an antibody under such conditions requires an antibody that is selected for its specificity for a particular protein. For example, polyclonal antibodies can be selected to obtain only a subset of antibodies that are specifically immunoreactive with the selected antigen and not with other proteins. This selection may be achieved by subtracting out antibodies that cross-react with other molecules. A variety of immunoassay formats may be used to select antibodies specifically immunoreactive with a particular protein. For example, solid-phase ELISA immunoassays are routinely used to select antibodies specifically immunoreactive with a protein (see, e.g., Harlow & Lane, Using Antibodies, A Laboratory Manual (1998) for a description of immunoassay formats and conditions that can be used to determine specific immunoreactivity).

[0215] Antibodies are large, complex molecules (molecular weight of ˜150,000 or about 1320 amino acids) with intricate internal structure. A natural antibody molecule contains two identical pairs of polypeptide chains, each pair having one light chain and one heavy chain. Each light chain and heavy chain in turn consists of two regions: a variable (“V”) region involved in binding the target antigen, and a constant (“C”) region that interacts with other components of the immune system. The light and heavy chain variable regions come together in 3-dimensional space to form a variable region that binds the antigen (for example, a receptor on the surface of a cell). Within each light or heavy chain variable region, there are three short segments (averaging 10 amino acids in length) called the complementarity determining regions (“CDRs”). The six CDRs in an antibody variable domain (three from the light chain and three from the heavy chain) fold up together in 3-dimensional space to form the actual antibody binding site which docks onto the target antigen. The position and length of the CDRs have been precisely defined by Kabat, E. et al., Sequences of Proteins of Immunological Interest, U.S. Department of Health and Human Services, 1983, 1987. The part of a variable region not contained in the CDRs is called the framework (“FR”), which forms the environment for the CDRs.

[0216] The term “antibody” is used according to its commonly known meaning in the art. Antibodies exist, e.g., as intact immunoglobulins or as a number of well-characterized fragments produced by digestion with various peptidases. Thus, for example, pepsin digests an antibody below the disulfide linkages in the hinge region to produce F(ab)′₂, a dimer of Fab which itself is a light chain joined to V_{H}-C_{H1} by a disulfide bond. The F(ab)′₂ may be reduced under mild conditions to break the disulfide linkage in the hinge region, thereby converting the F(ab)′₂ dimer into a Fab′ monomer. The Fab′ monomer is essentially Fab with part of the hinge region (see Fundamental Immunology (Paul ed., 3d ed. 1993). While various antibody fragments are defined in terms of the digestion of an intact antibody, one of skill will appreciate that such fragments may be synthesized de novo either chemically or by using recombinant DNA methodology. Thus, the term antibody, as used herein, also includes antibody fragments either produced by the modification of whole antibodies, or those synthesized de novo using recombinant DNA methodologies (e.g., single chain Fv) or those identified using phage display libraries (see, e.g., McCafferty et al., Nature 348:552-554 (1990)).

[0217] An exemplary immunoglobulin (antibody) structural unit comprises a tetramer. Each tetramer is composed of two identical pairs of polypeptide chains, each pair having one “light” (about 25 kD) and one “heavy” chain (about 50-70 kD). The N-terminus of each chain defines a variable region of about 100 to 110 or more amino acids primarily responsible for antigen recognition. The terms variable light chain (VL) and variable heavy chain (VH) refer to these light and heavy chains respectively. The Fc (i.e., fragment crystallizable region) is the “base” or “tail” of an immunoglobulin and is typically composed of two heavy chains that contribute two or three constant domains depending on the class of the antibody. By binding to specific proteins, the Fc region ensures that each antibody generates an appropriate immune response for a given antigen. The Fc region also binds to various cell receptors, such as Fc receptors, and other immune molecules, such as complement proteins.

[0218] As used herein, the term “antigen” and the term “epitope” refers to a molecule or substance capable of stimulating an immune response. In one example, epitopes include but are not limited to a polypeptide and a nucleic acid encoding a polypeptide, wherein expression of the nucleic acid into a polypeptide is capable of stimulating an immune response when the polypeptide is processed and presented on a Major Histocompatibility Complex (MHC) molecule. Generally, epitopes include peptides presented on the surface of cells non-covalently bound to the binding groove of Class I or Class II MHC, such that they can interact with T cell receptors and the respective T cell accessory molecules. However, antigens and epitopes also apply when discussing the antigen binding portion of an antibody, wherein the antibody binds to a specific structure of the antigen.

[0219] Proteolytic Processing of Antigens. Epitopes that are displayed by MHC on antigen presenting cells are cleavage peptides or products of larger peptide or protein antigen precursors. For MHC I epitopes, protein antigens are often digested by proteasomes resident in the cell. Intracellular proteasomal digestion produces peptide fragments of about 3 to 23 amino acids in length that are then loaded onto the MHC protein. Additional proteolytic activities within the cell, or in the extracellular milieu, can trim and process these fragments further. Processing of MHC Class II epitopes generally occurs via intracellular proteases from the lysosomal/endosomal compartment. The present invention includes, in one embodiment, pre-processed peptides that are attached to the anti-CD40 antibody (or fragment thereof) that directs the peptides against which an enhanced immune response is sought directly to antigen presenting cells.

[0220] The present invention includes methods for specifically identifying the epitopes within antigens most likely to lead to the immune response sought for the specific sources of antigen presenting cells and responder T cells.

[0221] As used herein, the term “T cell epitope” refers to a specific amino acid that when present in the context of a Major or Minor Histocompatibility Complex provides a reactive site for a T cell receptor. The T-cell epitopes or peptides that stimulate the cellular arm of a subject's immune system are short peptides of about 8-25 amino acids. T-cell epitopes are recognized by T cells from animals that are immune to the antigen of interest. These T-cell epitopes or peptides can be used in assays such as the stimulation of cytokine release or secretion or evaluated by constructing major histocompatibility (MHC) proteins containing or “presenting” the peptide. Such immunogenically active fragments are often identified based on their ability to stimulate lymphocyte proliferation in response to stimulation by various fragments from the antigen of interest.

[0222] As used herein, the term “immunological response” refers to an antigen or composition is the development in a subject of a humoral and/or a cellular immune response to an antigen present in the composition of interest. For purposes of the present disclosure, a “humoral immune response” refers to an immune response mediated by antibody molecules, while a “cellular immune response” is one mediated by T-lymphocytes and/or other white blood cells. One important aspect of cellular immunity involves an antigen-specific response by cytolytic T-cells (“CTL”s). CTLs have specificity for peptide antigens that are presented in association with proteins encoded by the major histocompatibility complex (MHC) and expressed on the surfaces of cells. CTLs help induce and promote the destruction of intracellular microbes, or the lysis of cells infected with such microbes. Another aspect of cellular immunity involves an antigen-specific response by helper T-cells. Helper T-cells act to help stimulate the function, and focus the activity of, nonspecific effector cells against cells displaying peptide antigens in association with MHC molecules on their surface. A “cellular immune response” also refers to the production of cytokines, chemokines and other such molecules produced by activated T-cells and/or other white blood cells, including those derived from CD4+ and CD8+ T-cells. Hence, an immunological response may include one or more of the following effects: the production of antibodies by B-cells; and/or the activation of effector and/or suppressor T-cells and/or gamma-delta T-cells directed specifically to an antigen or antigens present in the composition or vaccine of interest. These responses may serve to neutralize infectivity, and/or mediate antibody-complement, or antibody dependent cell cytotoxicity (ADCC) to provide protection to an immunized host. Such responses can be determined using standard immunoassays and neutralization assays, well known in the art.

[0223] As used herein, the term an “immunogenic composition” and “vaccine” refer to a composition that comprises an antigenic molecule where administration of the composition to a subject or patient results in the development in the subject of a humoral and/or a cellular immune response to the antigenic molecule of interest. “Vaccine” refers to a composition that can provide active acquired immunity to and/or therapeutic effect (e.g., treatment) of a particular disease or a pathogen. A vaccine typically contains one or more agents that can induce an immune response in a subject against a pathogen or disease, i.e., a target pathogen or disease. The immunogenic agent stimulates the body's immune system to recognize the agent as a threat or indication of the presence of the target pathogen or disease, thereby inducing immunological memory so that the immune system can more easily recognize and destroy any of the pathogen on subsequent exposure. Vaccines can be prophylactic (e.g., preventing or ameliorating the effects of a future infection by any natural or pathogen) or therapeutic (e.g., reducing symptoms or aberrant conditions associated with infection). The administration of vaccines is referred to vaccination.

[0224] In some examples, a vaccine composition can provide nucleic acid, e.g., mRNA that encodes antigenic molecules (e.g., peptides) to a subject. The nucleic acid that is delivered via the vaccine composition in the subject can be expressed into antigenic molecules and allow the subject to acquire immunity against the antigenic molecules. In the context of the vaccination against infectious disease, the vaccine composition can provide mRNA encoding antigenic molecules that are associated with a certain pathogen, e.g., one or more peptides that are known to be expressed in the pathogen (e.g., pathogenic bacterium or bacteria).

[0225] The present invention provides nucleic acid molecules, specifically polynucleotides, primary constructs and/or mRNA that encode one or more polynucleotides that express one or more peptides or proteins, comprising, consisting of, or consisting essentially of an amino acid sequence selected from any one of those sequences set forth in Tables 1-20, or a subsequence, portion, homologue, variant or derivative thereof for use in immune modulation. The term “nucleic acid” refers to any compound and/or substance that comprise a polymer of nucleotides, referred to herein as polynucleotides. Exemplary nucleic acids or polynucleotides of the invention include, but are not limited to, ribonucleic acids (RNAs), deoxyribonucleic acids (DNAs), threose nucleic acids (TNAs), glycol nucleic acids (GNAs), peptide nucleic acids (PNAs), locked nucleic acids (LNAs), including diastereomers of LNAs, functionalized LNAs, or hybrids thereof.

[0226] One method of immune modulation of the present invention includes direct or indirect gene transfer, i.e., local application of a preparation containing the one or more polynucleotides (DNA, RNA, mRNA, etc.) that expresses the one or more peptides or proteins, comprising, consisting of, or consisting essentially of an amino acid sequence selected from any one of those sequences set forth in Tables 1-20, or a subsequence, portion, homologue, variant or derivative thereof. A variety of well-known vectors can be used to deliver to cells the one or more polynucleotides or the peptides or proteins expressed by the polynucleotides, including but not limited to adenobacterial vectors and adeno-associated vectors. In addition, naked DNA, liposome delivery methods, or other novel vectors developed to deliver the polynucleotides to cells can also be beneficial. Any of a variety of promoters can be used to drive peptide or protein expression, including but not limited to endogenous promoters, constitutive promoters (e.g., cytomegalobacteria, adenobacteria, or SV40), inducible promoters (e.g., a cytokine promoter such as the interleukin-1, tumor necrosis factor-alpha, or interleukin-6 promoter), and tissue specific promoters to express the immunogenic peptides or proteins of the present invention.

[0227] The immunization may include adenobacteria, adeno-associated bacteria, herpes bacteria, vaccinia bacteria, retrobacteriaes, or other bacterial vectors with the appropriate tropism for cells likely to present the antigenic peptide(s) or protein(s) may be used as a gene transfer delivery system for a therapeutic peptide(s) or protein(s), comprising, consisting of, or consisting essentially of an amino acid sequence selected from any one of those sequences set forth in Tables 1-20, or a subsequence, portion, homologue, variant or derivative thereof, gene expression construct. Bacterial vectors which do not require that the target cell be actively dividing, such as adenobacterial and adeno-associated vectors, are particularly useful when the cells are accumulating, but not proliferative. Numerous vectors useful for this purpose are generally known (Miller, Human Gene Therapy 15-14, 1990; Friedman, Science 244:1275-1281, 1989; Eglitis and Anderson, BioTechniques 6:608-614, 1988; Tolstoshev and Anderson, Current Opinion in Biotechnology 1:55-61, 1990; Sharp, The Lancet 337:1277-1278, 1991; Cornetta et al., Nucleic Acid Research and Molecular Biology 36:311-322, 1987; Anderson, Science 226:401-409, 1984; Moen, Blood Cells 17:407-416, 1991; and Miller and Rosman, Bio Techniques 7:980-990, 1989; Le Gal La Salle et al., Science 259:988-990, 1993; and Johnson, Chest 107:77S-83S, 1995). Retrobacterial vectors are particularly well developed and have been used in clinical settings (Rosenberg et al., N. Engl. J. Med 323:370, 1990; Anderson et al., U.S. Pat. No. 5,399,346).

[0228] The immunization may also include inserting the one or more polynucleotides (DNA, RNA, mRNA, etc.) that express the one or more peptides or proteins, comprising, consisting of, or consisting essentially of an amino acid sequence selected from any one of those sequences set forth in Tables 1-20, or a subsequence, portion, homologue, variant or derivative thereof into the bacterial vector, along with another gene which encodes the ligand for a receptor on a specific target cell, for example, such that the vector is now target specific. Bacterial vectors can be made target specific by attaching, for example, a sugar, a glycolipid, or a protein. Targeting can also be accomplished by using an antibody to target the bacterial vector. Those of skill in the art will know of, or can readily ascertain without undue experimentation, specific polynucleotide sequences which can be inserted into the bacterial genome or attached to a bacterial envelope to allow target specific delivery of the bacterial vector containing the gene.

[0229] Since recombinant bacteriaes are defective, they require assistance in order to produce infectious vector particles. This assistance can be provided, for example, by using helper cell lines that contain plasmids encoding all of the structural genes of the bacteria under the control of regulatory sequences within the bacterial genome. These plasmids are missing a nucleotide sequence which enables the packaging mechanism to recognize a polynucleotide transcript for encapsidation. These cell lines produce empty virions, since no genome is packaged. If a bacterial vector is introduced into such cells in which the packaging signal is intact, but the structural genes are replaced by other genes of interest, the vector can be packaged and vector virion produced.

[0230] Bacterial or non-bacterial approaches may also be employed for the introduction of one or more therapeutic polynucleotides that express the one or more peptides or proteins, comprising, consisting of, or consisting essentially of an amino acid sequence selected from any one of those sequences set forth in Tables 1-20, or a subsequence, portion, homologue, variant or derivative thereof, into polynucleotide-encoding polynucleotide into antigen presenting cells. The polynucleotides may be DNA, RNA, mRNA that directly encode the one or more peptides or proteins of the present invention, or may be introduced as part of an expression vector.

[0231] Another example of an immunization includes colloidal dispersion systems that include macromolecule complexes, nanocapsules, microspheres, beads, and lipid-based systems including oil-in-water emulsions, micelles, mixed micelles, and liposomes and the one or more polynucleotides that express the one or more peptides or proteins, comprising, consisting of, or consisting essentially of an amino acid sequence selected from any one of those sequences set forth in Tables 1-20, or a subsequence, portion, homologue, variant or derivative thereof. One non-limiting example of a colloidal system for use with the present invention is a liposome. Liposomes are artificial membrane vesicles which are useful as delivery vehicles in vitro and in vivo. It has been shown that large unilamellar vesicles (LUV), which range in size from 0.2-4.0 micrometers that can encapsulate a substantial percentage of an aqueous buffer containing large macromolecules. RNA, DNA and intact virions can be encapsulated within the aqueous interior and be delivered to cells in a biologically active form (Fraley, et al., Trends Biochem. Sci., 6:77, 1981). In addition to mammalian cells, liposomes have been used for delivery of polynucleotides in plant, yeast and bacterial cells. In order for a liposome to be an efficient gene transfer vehicle, the following characteristics should be present: (Zakut and Givol, supra) encapsulation of the genes of interest at high efficiency while not compromising their biological activity; (Fearnhead, et al., supra) preferential and substantial binding to a target cell in comparison to non-target cells; (Korsmeyer, S. J., supra) delivery of the aqueous contents of the vesicle to the target cell cytoplasm at high efficiency; and (Kinoshita, et al., supra) accurate and effective expression of genetic information (Mannino, et al., Bio Techniques, 6:682, 1988).

[0232] The composition for immunizing the subject or patient may, in certain embodiments comprise a combination of phospholipid, particularly high-phase-transition-temperature phospholipids, usually in combination with steroids, especially cholesterol. Other phospholipids or other lipids may also be used. The physical characteristics of liposomes depend on pH, ionic strength, and the presence of divalent cations. The targeting of liposomes can be classified based on anatomical and mechanistic factors. Anatomical classification is based on the level of selectivity, for example, organ-specific, cell-specific, and organelle-specific. Mechanistic targeting can be distinguished based upon whether it is passive or active. Passive targeting utilizes the natural tendency of liposomes to distribute to cells of the reticuloendothelial system (RES) in organs which contain sinusoidal capillaries. Active targeting, on the other hand, involves alteration of the liposome by coupling the liposome to a specific ligand such as a monoclonal antibody, sugar, glycolipid, or protein, or by changing the composition or size of the liposome in order to achieve targeting to organs and cell types other than the naturally occurring sites of localization, specifically, cells that can become infected with a Bordetella or interact with the proteins, peptides, and/or gene products of a Bordetella, e.g., immune cells.

[0233] For any of the above approaches, the immune modulating polynucleotide construct, composition, or formulation is preferably applied to a site that will enhance the immune response. For example, the immunization may be intramuscular, intraperitoneal, enteral, parenteral, intranasal, intrapulmonary, or subcutaneous. In the gene delivery constructs of the instant invention, polynucleotide expression is directed from any suitable promoter (e.g., the human cytomegalobacteria, simian bacteria 40, actin or adenobacteria constitutive promoters; or the cytokine or metalloprotease promoters for activated synoviocyte specific expression).

[0234] In one example of the immune modifying peptide(s) or protein(s) include polynucleotides, constructs and/or mRNAs that express the one or more polynucleotides that express the one or more peptides or proteins, comprising, consisting of, or consisting essentially of an amino acid sequence selected from any one of those sequences set forth in Tables 1-20, or a subsequence, portion, homologue, variant or derivative thereof, that are designed to improve one or more of the stability and/or clearance in tissues, uptake and/or kinetics, cellular access by the peptide(s) or protein(s), translational, mRNA half-life, translation efficiency, immune evasion, protein production capacity, accessibility to circulation, peptide(s) or protein(s) half-life and/or presentation in the context of MHC on antigen presenting cells.

[0235] The present invention contemplates immunization for use in both active and passive immunization embodiments. Immunogenic compositions, proposed to be suitable for use as a vaccine, may be prepared most readily directly from immunogenic peptides, proteins, monomers, multimers and/or peptide-MHC complexes prepared in a manner disclosed herein. The antigenic material is generally processed to remove undesired contaminants, such as, small molecular weight molecules, incomplete proteins, or when manufactured in plant cells, plant components such as cell walls, plant proteins, and the like. Often, these immunizations are lyophilized for ease of transport and/or to increase shelf-life and can then be more readily dissolved in a desired vehicle, such as saline.

[0236] The preparation of immunizations (also referred to as vaccines) that contain the immunogenic proteins of the present invention as active ingredients is generally well understood in the art, as exemplified by U.S. Pat. Nos. 4,608,251; 4,601,903; 4,599,231; 4,599,230; 4,596,792; and 4,578,770, all incorporated herein by reference. Typically, such immunizations are prepared as injectables. The immunizations can be a liquid solution or suspension but may also be provided in a solid form suitable for solution in, or suspension in, liquid prior to injection may also be prepared. The preparation may also be emulsified. The active immunogenic ingredient is often mixed with excipients that are pharmaceutically acceptable and compatible with the active ingredient. Suitable excipients are, for example, water, saline, dextrose, glycerol, ethanol, buffers, or the like and combinations thereof. In addition, if desired, the immunization may contain minor amounts of auxiliary substances such as wetting or emulsifying agents, pH buffering agents, or adjuvants which enhance the effectiveness of the vaccines.

[0237] The immunization is/are administered in a manner compatible with the dosage formulation, and in such amount as will be therapeutically effective and immunogenic. The quantity to be administered depends on the subject to be treated, including, e.g., the capacity of the individual's immune system to synthesize antibodies, and the degree of protection desired. Precise amounts of active ingredient required to be administered depend on the judgment of the practitioner. However, suitable dosage ranges are of the order of several hundred micrograms active ingredient per vaccination. Suitable regimes for initial administration and booster shots are also variable but are typified by an initial administration followed by subsequent inoculations or other administrations.

[0238] The manner of application of the immunization may be varied widely. Any of the conventional methods for administration of a vaccine are applicable. These are believed to also include oral application on a solid physiologically acceptable base or in a physiologically acceptable dispersion, parenterally, by injection or the like. The dosage of the vaccine will depend on the route of administration and will vary according to the size of the host.

[0239] Various methods of achieving adjuvant effect for the vaccine includes use of agents such as aluminum hydroxide or phosphate (alum), commonly used as 0.05 to 0.1 percent solution in phosphate buffered saline, admixture with synthetic polymers of sugars (Carbopol) used as 0.25 percent solution, aggregation of the protein in the vaccine by heat treatment with temperatures ranging between 70° to 101° C. for 30 second to 2-minute periods respectively. Aggregation by reactivating with pepsin treated (Fab) antibodies to albumin, mixture with bacterial cells such as C. parvum or endotoxins or lipopolysaccharide components of gram-negative bacteria, emulsion in physiologically acceptable oil vehicles such as mannide mono-oleate (Aracel A) or emulsion with 20 percent solution of a perfluorocarbon (Fluosol-DA) used as a block substitute may also be employed.

[0240] In many instances, it will be desirable to have multiple administrations of the vaccine, usually not exceeding six to ten immunizations, more usually not exceeding four immunizations and preferably one or more, usually at least about three immunizations. The immunizations will normally be at from two to twelve-week intervals, more usually from three to five-week intervals. Periodic boosters at intervals of 1-5 years, usually three years, will be desirable to maintain protective levels of the antibodies. The course of the immunization may be followed by assays for antibodies for the supernatant antigens. The assays may be performed by labeling with conventional labels, such as radionuclides, enzymes, fluorescent agents, and the like. These techniques are well known and may be found in a wide variety of patents, such as Hudson and Cranage, Vaccine Protocols, 2003 Humana Press, relevant portions incorporated herein by reference.

[0241] Techniques and compositions for making useful dosage forms using the present invention are described in one or more of the following references: Anderson, Philip O.; Knoben, James E.; Troutman, William G, eds., Handbook of Clinical Drug Data, Tenth Edition, McGraw-Hill, 2002; Pratt and Taylor, eds., Principles of Drug Action, Third Edition, Churchill Livingston, New York, 1990; Katzung, ed., Basic and Clinical Pharmacology, Ninth Edition, McGraw Hill, 2007; Goodman and Gilman, eds., The Pharmacological Basis of Therapeutics, Tenth Edition, McGraw Hill, 2001; Remington's Pharmaceutical Sciences, 20th Ed., Lippincott Williams & Wilkins., 2000, and updates thereto; Martindale, The Extra Pharmacopoeia, Thirty-Second Edition (The Pharmaceutical Press, London, 1999); all of which are incorporated by reference, and the like, relevant portions incorporated herein by reference.

[0242] Many suitable expression systems are commercially available, including, for example, the following: baculobacteria expression (Reilly, P. R., et al., BACULOBACTERIA EXPRESSION VECTORS: A LABORATORY MANUAL (1992); Beames, et al., Biotechniques 11:378 (1991); Pharmingen; Clontech, Palo Alto, Calif)), vaccinia expression systems (Earl, P. L., et al., “Expression of proteins in mammalian cells using vaccinia” In Current Protocols in Molecular Biology (F. M. Ausubel, et al. Eds.), Greene Publishing Associates & Wiley Interscience, New York (1991); Moss, B., et al., U.S. Pat. No. 5,135,855, issued Aug. 4, 1992), expression in bacteria (Ausubel, F. M., et al., CURRENT PROTOCOLS IN MOLECULAR BIOLOGY, John Wiley and Sons, Inc., Media Pa.; Clontech), expression in yeast (Rosenberg, S. and Tekamp-Olson, P., U.S. Pat. No. RE35,749, issued, Mar. 17, 1998, herein incorporated by reference; Shuster, J. R., U.S. Pat. No. 5,629,203, issued May 13, 1997, herein incorporated by reference; Gellissen, G., et al., Antonie Van Leeuwenhoek, 62(1-2):79-93 (1992); Romanos, M. A., et al., Yeast 8(6):423-488 (1992); Goeddel, D. V., Methods in Enzymology 185 (1990); Guthrie, C., and G. R. Fink, Methods in Enzymology 194 (1991)), expression in mammalian cells (Clontech; Gibco-BRL, Ground Island, N.Y.; e.g., Chinese hamster ovary (CHO) cell lines (Haynes, J., et al., Nuc. Acid. Res. 11:687-706 (1983); 1983, Lau, Y. F., et al., Mol. Cell. Biol. 4:1469-1475 (1984); Kaufman, R. J., “Selection and coamplification of heterologous genes in mammalian cells,” in Methods in Enzymology, vol. 185, pp 537-566. Academic Press, Inc., San Diego Calif. (1991)), and expression in plant cells (plant cloning vectors, Clontech Laboratories, Inc., Palo-Alto, Calif, and Pharmacia LKB Biotechnology, Inc., Pistcataway, N.J.; Hood, E., et al., J. Bacteriol. 168:1291-1301 (1986); Nagel, R., et al., FEMS Microbiol. Lett. 67:325 (1990); An, et al., “Binary Vectors”, and others in Plant Molecular Biology Manual A3:1-20 (1988); Miki, B. L. A., et al., pp. 249-265, and others in Plant DNA Infectious Agents (Hohn, T., et al., eds.) Springer-Verlag, Wien, Austria, (1987); Plant Molecular Biology: Essential Techniques, P. G. Jones and J. M. Sutton, New York, J. Wiley, 1997; Miglani, Gurbachan Dictionary of Plant Genetics and Molecular Biology, New York, Food Products Press, 1998; Henry, R. J., Practical Applications of Plant Molecular Biology, New York, Chapman & Hall, 1997), relevant portion incorporated herein by reference.

[0243] As used herein, the term “effective amount” or “effective dose” refers to that amount of the peptide or protein T cell epitopes of the invention sufficient to induce immunity, to prevent and/or ameliorate an infection or to reduce at least one symptom of an infection and/or to enhance the efficacy of another dose of peptide or protein T cell epitopes. An effective dose may refer to the amount of peptide or protein T cell epitopes sufficient to delay or minimize the onset of an infection. An effective dose may also refer to the amount of peptide or protein T cell epitopes that provides a therapeutic benefit in the treatment or management of an infection. Further, an effective dose is the amount with respect to peptide or protein T cell epitopes of the invention alone, or in combination with other therapies, that provides a therapeutic benefit in the treatment or management of an infection. An effective dose may also be the amount sufficient to enhance a subject's (e.g., a human's) own immune response against a subsequent exposure to an infectious agent. Levels of immunity can be monitored, e.g., by measuring amounts of neutralizing secretory and/or serum antibodies, e.g., by plaque neutralization, complement fixation, enzyme-linked immunosorbent, or microneutralization assay. In the case of a vaccine, an “effective dose” is one that prevents disease and/or reduces the severity of symptoms. A “reduction” of a symptom or symptoms (and grammatical equivalents of this phrase) means decreasing of the severity or frequency of the symptom(s), or elimination of the symptom(s). A “prophylactically effective amount” of a drug is an amount of a drug that, when administered to a subject, will have the intended prophylactic effect, e.g., preventing or delaying the onset (or reoccurrence) of an injury, disease, pathology or condition, or reducing the likelihood of the onset (or reoccurrence) of an injury, disease, pathology, or condition, or their symptoms, in this case, an infectious disease, and more particularly, a Bordetella infection. The full prophylactic effect does not necessarily occur by administration of one dose, and may occur only after administration of a series of doses. Thus, a prophylactically effective amount may be administered in one or more administrations. Guidance can be found in the literature for appropriate dosages for given classes of pharmaceutical products. For example, for the given parameter, an effective amount will show an increase or decrease of at least 5%, 10%, 15%, 20%, 25%, 40%, 50%, 60%, 75%, 80%, 90%, or at least 100%. Efficacy can also be expressed as “-fold” increase or decrease. For example, a therapeutically effective amount can have at least a 1.2-fold, 1.5-fold, 2-fold, 5-fold, or more effect over a control. The exact amounts will depend on the purpose of the treatment, and will be ascertainable by one skilled in the art using known techniques (see, e.g., Lieberman, Pharmaceutical Dosage Forms (vols. 1-3, 1992); Lloyd, The Art, Science and Technology of Pharmaceutical Compounding (1999); Pickar, Dosage Calculations (1999); and Remington: The Science and Practice of Pharmacy, 20th Edition, 2003, Gennaro, Ed., Lippincott, Williams & Wilkins), relevant portions incorporated herein by reference.

[0244] As used herein, the term “immune stimulator” refers to a compound that enhances an immune response via the body's own chemical messengers (cytokines). These molecules comprise various cytokines, lymphokines and chemokines with immunostimulatory, immunopotentiating, and pro-inflammatory activities, such as interferons, interleukins (e.g., IL-1, IL-2, IL-3, IL-4, IL-12, IL-13); growth factors (e.g., granulocyte-macrophage (GM)-colony stimulating factor (CSF)); and other immunostimulatory molecules, such as macrophage inflammatory factor, Flt3 ligand, B7.1; B7.2, etc. The immune stimulator molecules can be administered in the same formulation as peptide or protein T cell epitopes s of the invention, or can be administered separately. Either the protein or an expression vector encoding the protein can be administered to produce an immunostimulatory effect.

[0245] As used herein, in certain embodiments, the term “protective immune response” or “protective response” refers to an immune response mediated by antibodies against an infectious agent, which is exhibited by a vertebrate (e.g., a human), which prevents or ameliorates an infection or reduces at least one symptom thereof. Peptide and protein T cell epitopes of the invention can stimulate the production of antibodies that, for example, neutralize infectious agents, blocks infectious agents from entering cells, blocks replication of said infectious agents, and/or protect host cells from infection and destruction. In other embodiments, the term can also refer to an immune response that is mediated by T-lymphocytes and/or other white blood cells against an infectious agent, exhibited by a vertebrate (e.g., a human), that prevents or ameliorates flavibacteria infection or reduces at least one symptom thereof. Peptide and protein T cell epitopes of the invention can stimulate the T cell responses that, for example, neutralize infectious agents, kill bacteria infected cells, blocks infectious agents from entering cells, blocks replication of said infectious agents, and/or protect host cells from infection and destruction.

[0246] The terms “biological sample” or “sample” refer to materials obtained from or derived from a subject or patient. A biological sample includes sections of tissues such as biopsy and autopsy samples, and frozen sections taken for histological purposes. Such samples include bodily fluids such as blood and blood fractions or products (e.g., serum, plasma, platelets, red blood cells, and the like), sputum, tissue, cultured cells (e.g., primary cultures, explants, and transformed cells) stool, urine, synovial fluid, joint tissue, synovial tissue, synoviocytes, fibroblast-like synoviocytes, macrophage-like synoviocytes, immune cells, hematopoietic cells, fibroblasts, macrophages, T cells, etc. A biological sample is typically obtained from a eukaryotic organism, such as a mammal such as a primate e.g., chimpanzee or human; cow; dog; cat; a rodent, e.g., guinea pig, rat, mouse; rabbit; or a bird; reptile; or fish.

[0247] As used herein, a “cell” refers to a cell carrying out metabolic or other function sufficient to preserve or replicate its genomic DNA. A cell can be identified by well-known methods in the art including, for example, presence of an intact membrane, staining by a particular dye, ability to produce progeny or, in the case of a gamete, ability to combine with a second gamete to produce a viable offspring. Cells may include prokaryotic and eukaryotic cells. Prokaryotic cells include but are not limited to bacteria. Eukaryotic cells include but are not limited to yeast cells and cells derived from plants and animals, for example mammalian, insect (e.g., Spodoptera) and human cells. Cells may be useful when they are naturally nonadherent or have been treated not to adhere to surfaces, for example by trypsinization.

[0248] As used herein, the term “contacting” is used in accordance with its plain ordinary meaning and refers to the process of allowing at least two distinct species to become sufficiently proximal to react, interact or physically touch. It should be appreciated, however, the resulting reaction product can be produced directly from a reaction between the added reagents or from an intermediate from one or more of the added reagents which can be produced in the reaction mixture. The term “contacting” may include allowing two species to react, interact, or physically touch, wherein the two species may be, for example, an amino acid sequence, protein, or peptide as provided herein and an immune cell, such as a T cell.

[0249] As used herein, a “control” sample or value refers to a sample that serves as a reference, usually a known reference, for comparison to a test sample. For example, a test sample can be taken from a test condition, e.g., in the presence of a test compound, and compared to samples from known conditions, e.g., in the absence of the test compound (negative control), or in the presence of a known compound (positive control). A control can also represent an average value gathered from a number of tests or results. One of skill in the art will recognize that controls can be designed for assessment of any number of parameters. For example, a control can be devised to compare therapeutic benefit based on pharmacological data (e.g., half-life) or therapeutic measures (e.g., comparison of side effects). One of skill in the art will understand which controls are valuable in a given situation and be able to analyze data based on comparisons to control values. Controls are also valuable for determining the significance of data. For example, if values for a given parameter are widely variant in controls, variation in test samples will not be considered as significant.

[0250] The term “modulator” refers to a composition that increases or decreases the level of a target molecule or the function of a target molecule or the physical state of the target of the molecule relative to the absence of the modulator.

[0251] The term “modulate” is used in accordance with its plain ordinary meaning and refers to the act of changing or varying one or more properties. “Modulation” refers to the process of changing or varying one or more properties. For example, as applied to the effects of a modulator on a target protein, to modulate means to change by increasing or decreasing a property or function of the target molecule or the amount of the target molecule.

[0252] The terms “associated” or “associated with” in the context of a substance or substance activity or function associated with a disease (e.g. a protein associated disease, a cancer (e.g., cancer, inflammatory disease, autoimmune disease, or infectious disease)) means that the disease (e.g. cancer, inflammatory disease, autoimmune disease, or infectious disease) is caused by (in whole or in part), or a symptom of the disease is caused by (in whole or in part) the substance or substance activity or function. As used herein, what is described as being associated with a disease, if a causative agent, could be a target for treatment of the disease.

[0253] The term “aberrant” as used herein refers to different from normal. When used to describe enzymatic activity or protein function, aberrant refers to activity or function that is greater or less than a normal control or the average of normal non-diseased control samples. Aberrant activity may refer to an amount of activity that results in a disease, wherein returning the aberrant activity to a normal or non-disease-associated amount (e.g., by administering a compound or using a method as described herein), results in reduction of the disease or one or more disease symptoms.

[0254] The terms “subject” or “subject in need thereof” refers to a living organism who is at risk of or prone to having a disease or condition, or who is suffering from a disease or condition that can be treated by administration of a composition or pharmaceutical composition as provided herein. Non-limiting examples include humans and other primates, but also includes non-human primates such as chimpanzees and other apes and monkey species; farm animals such as cattle, sheep, pigs, goats and horses; domestic mammals such as dogs and cats; laboratory animals including rodents such as mice, rats and guinea pigs; birds, including domestic, wild and game birds such as chickens, turkeys and other gallinaceous birds, ducks, geese, and the like. The term does not denote a particular age. Thus, both adult and newborn individuals are intended to be covered. The system described above is intended for use in any of the above vertebrate species, since the immune systems of all of these vertebrates operate similarly.

[0255] The terms “disease” or “condition” refer to a state of being or health status of a patient or subject capable of being treated with a compound, pharmaceutical composition, or method provided herein. In embodiments, a patient or subject is human. In embodiments, the disease is Bordetella infection. In certain alternative embodiments, the disease is B. pertussis infection. In still other embodiments, the disease is whooping cough.

[0256] As used herein, “treatment” or “treating,” or “palliating” or “ameliorating” are used interchangeably herein. These terms refer to an approach for obtaining beneficial or desired results including but not limited to therapeutic benefit and/or a prophylactic benefit. By therapeutic benefit is meant eradication or amelioration of the underlying disorder being treated or the disorder resulting from bacterial infection. Also, a therapeutic benefit is achieved with the eradication or amelioration of one or more of the physiological symptoms associated with bacterial infection or the underlying disorder such that an improvement is observed in the patient, notwithstanding that the patient may still be afflicted with the underlying disorder or may still be infected. For prophylactic benefit, the compositions may be administered to a patient at risk of bacterial infection, of developing a particular disease, or to a patient reporting one or more of the physiological symptoms of a disease, even though a diagnosis of this disease may not have been made. Treatment includes preventing the infection or disease, that is, causing the clinical symptoms of the disease not to develop by administration of a protective composition prior to infection or the induction of the disease; suppressing the disease, that is, causing the clinical symptoms of the disease or infection not to develop by administration of a protective composition after the inductive event or infection but prior to the clinical appearance or reappearance of the disease; inhibiting the disease, that is, arresting the development of clinical symptoms by administration of a protective composition after their initial appearance; preventing re-occurring of the disease and/or relieving the disease, that is, causing the regression of clinical symptoms by administration of a protective composition after their initial appearance. “Treatment” can also refer to any of (i) the prevention of infection or reinfection, as in a traditional vaccine, (ii) the reduction or elimination of symptoms, and (iii) the substantial or complete elimination of the pathogen in question. Treatment may be affected prophylactically (prior to infection) or therapeutically (following infection).

[0257] In addition, in certain embodiments, “treatment,” “treat,” or “treating” refers to a method of reducing the effects of one or more symptoms of infection with a Bordetella. Thus, in the disclosed method, treatment can refer to a 10%, 20%, 30%, 40%, 50%, 60%, 70%, 80%, 90%, or 100% reduction in the severity of an established infection, disease, condition, or symptom of the infection, disease or condition. For example, a method for treating a disease is considered to be a treatment if there is a 10% reduction in one or more symptoms of the disease in a subject as compared to a control. Thus, the reduction can be a 10%, 20%, 30%, 40%, 50%, 60%, 70%, 80%, 90%, 100%, or any percent reduction in between 10% and 100% as compared to native or control levels. It is understood that treatment does not necessarily refer to a cure or complete ablation of the disease, condition, or symptoms of the disease or condition and/or complete prevention of infection. Further, as used herein, references to decreasing, reducing, or inhibiting include a change of 10%, 20%, 30%, 40%, 50%, 60%, 70%, 80%, 90% or greater as compared to a control level and such terms can include but do not necessarily include complete elimination.

[0258] As used herein the terms “diagnose” or “diagnosing” refers to recognition of an infection, disease or condition by signs and symptoms. Diagnosing can refer to determination of whether a subject has an infection or disease. Diagnosis may refer to determination of the type of disease or condition a subject has or the type of bacteria the subject is infected with.

[0259] Diagnostic agents provided herein include any such agent, which are well-known in the relevant art. Among imaging agents are fluorescent and luminescent substances, including, but not limited to, a variety of organic or inorganic small molecules commonly referred to as “dyes,” “labels,” or “indicators.” Examples include fluorescein, rhodamine, acridine dyes, Alexa dyes, and cyanine dyes. Enzymes that may be used as imaging agents in accordance with the embodiments of the disclosure include, but are not limited to, horseradish peroxidase, alkaline phosphatase, acid phosphatase, glucose oxidase, β-galactosidase, β-glucoronidase or β-lactamase. Such enzymes may be used in combination with a chromogen, a fluorogenic compound or a luminogenic compound to generate a detectable signal.

[0260] The peptide(s) or protein(s) of the present invention can also be used in binding assays including, but are not limited to, immunoassays such as competitive and non-competitive assay systems using techniques such as western blots, radioimmunoassays, ELISA (enzyme linked immunosorbent assay), “sandwich” immunoassays, Meso Scale Discovery (MSD, Gaithersburg, Md.), immunoprecipitation assays, ELISPOT, precipitin reactions, gel diffusion precipitin reactions, immunodiffusion assays, agglutination assays, complement-fixation assays, immunoradiometric assays, fluorescent immunoassays, and protein A immunoassays. Such assays are routine and well known in the art (see, e.g., Ausubel et al., eds, 1994, Current Protocols in Molecular Biology, Vol. 1, John Wiley & Sons, Inc., New York, relevant portions incorporated herein by reference).

[0261] Radioactive substances that may be used as imaging agents in accordance with the embodiments of the disclosure include, but are not limited to, ¹⁸F, ³²P, ³³P, ⁴⁵Ti, ⁴⁷Sc, ⁵²Fe, ⁵⁹Fe, ⁶²Cu, ⁶⁴Cu, ⁶⁷Cu, ⁶⁷Ga, ⁶⁸Ga, ⁷⁷As, ⁸⁶Y ⁹⁰Y, ⁸⁹Sr, ⁸⁹Zr, ⁹⁴Tc, ⁹⁴Tc, ^{99m}Tc ⁹⁹Mo, ¹⁰⁵Pd, ¹⁰⁵Rh, ¹¹¹Ag, ¹¹¹In, ¹²³I, ¹²⁴I, ¹²⁵I, ¹³¹I, ¹⁴²Pr, ¹⁴³Pr, ¹⁴⁹Pm, ¹⁵³m, ¹⁵⁴⁻¹⁵⁸¹Gd, ¹⁶¹Tb, ¹⁶⁶Dy, ¹⁶⁶Ho, ¹⁶⁹Er, ¹⁷⁵Lu, ¹⁷⁷Lu, ¹⁸⁶Re, ¹⁸⁸Re, ¹⁸⁹Re, ¹⁹⁴I, ¹⁹⁸Au, ¹⁹⁹Au, ²¹¹At, ²¹¹Pb, ²¹²Bi, ²¹²Pb, ²¹³Bi, ²²³Ra and ²²⁵Ac. Paramagnetic ions that may be used as additional imaging agents in accordance with the embodiments of the disclosure include, but are not limited to, ions of transition and lanthanide metals (e.g., metals having atomic numbers of 21-29, 42, 43, 44, or 57-71). These metals include ions of Cr, V, Mn, Fe, Co, Ni, Cu, La, Ce, Pr, Nd, Pm, Sm, Eu, Gd, Tb, Dy, Ho, Er, Tm, Yb and Lu.

[0262] When the imaging agent is a radioactive metal or paramagnetic ion, the agent may be reacted with another long-tailed reagent having a long tail with one or more chelating groups attached to the long tail for binding to these ions. The long tail may be a polymer such as a polylysine, polysaccharide, or other derivatized or derivatizable chain having pendant groups to which the metals or ions may be added for binding. Examples of chelating groups that may be used according to the disclosure include, but are not limited to, ethylenediaminetetraacetic acid (EDTA), diethylenetriaminepentaacetic acid (DTPA), DOTA, NOTA, NETA, TETA, porphyrins, polyamines, crown ethers, bis-thiosemicarbazones, polyoximes, and like groups.

[0263] The terms “dose” and “dosage” are used interchangeably herein. A dose refers to the amount of active ingredient given to an individual at each administration. The dose will vary depending on a number of factors, including the range of normal doses for a given therapy, frequency of administration; size and tolerance of the individual; severity of the condition; risk of side effects; and the route of administration. One of skill will recognize that the dose can be modified depending on the above factors or based on therapeutic progress. The term “dosage form” refers to the particular format of the pharmaceutical or pharmaceutical composition, and depends on the route of administration. For example, a dosage form can be in a liquid form for nebulization, e.g., for inhalants, in a tablet or liquid, e.g., for oral delivery, or a saline solution, e.g., for injection.

[0264] As used herein, the term “administering” means oral administration, administration as a suppository, topical contact, intravenous, intraperitoneal, intramuscular, intralesional, intrathecal, intranasal or subcutaneous administration, or the implantation of a slow-release device, e.g., a mini-osmotic pump, to a subject. Administration is by any route, including parenteral and transmucosal (e.g., buccal, sublingual, palatal, gingival, nasal, vaginal, rectal, or transdermal). Parenteral administration includes, e.g., intravenous, intramuscular, intra-arteriole, intradermal, subcutaneous, intraperitoneal, intraventricular, and intracranial. Other modes of delivery include, but are not limited to, the use of liposomal formulations, intravenous infusion, transdermal patches, etc. By “co-administer” it is meant that a composition described herein is administered at the same time, just prior to, or just after the administration of one or more additional therapies, for example cancer therapies such as chemotherapy, hormonal therapy, radiotherapy, or immunotherapy. The compounds of the invention can be administered alone or can be co-administered to the patient. Co-administration is meant to include simultaneous or sequential administration of the compounds individually or in combination (more than one compound). Thus, the preparations can also be combined, when desired, with other active substances (e.g., to reduce metabolic degradation). The compositions of the present invention can be delivered by transdermally, by a topical route, formulated as applicator sticks, solutions, suspensions, emulsions, gels, creams, ointments, pastes, jellies, paints, powders, and aerosols.

[0265] Formulations suitable for oral administration can consist of (a) liquid solutions, such as an effective amount of the antibodies provided herein suspended in diluents, such as water, saline or PEG 400; (b) capsules, sachets or tablets, each containing a predetermined amount of the active ingredient, as liquids, solids, granules or gelatin; (c) suspensions in an appropriate liquid; and (d) suitable emulsions. Tablet forms can include one or more of lactose, sucrose, mannitol, sorbitol, calcium phosphates, corn starch, potato starch, microcrystalline cellulose, gelatin, colloidal silicon dioxide, talc, magnesium stearate, stearic acid, and other excipients, colorants, fillers, binders, diluents, buffering agents, moistening agents, preservatives, flavoring agents, dyes, disintegrating agents, and pharmaceutically compatible carriers. Lozenge forms can comprise the active ingredient in a flavor, e.g., sucrose, as well as pastilles comprising the active ingredient in an inert base, such as gelatin and glycerin or sucrose and acacia emulsions, gels, and the like containing, in addition to the active ingredient, carriers known in the art.

[0266] Pharmaceutical compositions can also include large, slowly metabolized macromolecules such as proteins, polysaccharides such as chitosan, polylactic acids, polyglycolic acids and copolymers (such as latex functionalized Sepharose™, agarose, cellulose, and the like), polymeric amino acids, amino acid copolymers, and lipid aggregates (such as oil droplets or liposomes). Additionally, these carriers can function as immunostimulating agents (i.e., adjuvants).

[0267] The term “adjuvant” refers to a compound that when administered in conjunction with the compositions provided herein including embodiments thereof, augments the composition's immune response. Generally, adjuvants are non-toxic, have high-purity, are degradable, and are stable.

[0268] Adjuvants can augment an immune response by several mechanisms including lymphocyte recruitment, stimulation of B and/or T cells, and stimulation of macrophages. The adjuvant increases the titer of induced antibodies and/or the binding affinity of induced antibodies relative to the situation if the immunogen were used alone. A variety of adjuvants can be used in combination with the agents provided herein including embodiments thereof, to elicit an immune response. Preferred adjuvants augment the intrinsic response to an immunogen without causing conformational changes in the immunogen that affect the qualitative form of the response. Preferred adjuvants include aluminum hydroxide and aluminum phosphate, 3 De-O-acylated monophosphoryl lipid A (MPL™) (see GB 2220211 (RIBI ImmunoChem Research Inc., Hamilton, Montana, now part of Corixa). Stimulon™ QS-21 is a triterpene glycoside or saponin isolated from the bark of the Quillaja Saponaria Molina tree found in South America (see Kensil et al., in Vaccine Design: The Subunit and Adjuvant Approach (eds. Powell & Newman, Plenum Press, NY, 1995); U.S. Pat. No. 5,057,540), (Aquila BioPharmaceuticals, Framingham, MA). Other adjuvants are oil in water emulsions (such as squalene or peanut oil), optionally in combination with immune stimulants, such as monophosphoryl lipid A (see Stoute et al., N. Engl. J. Med. 336, 86-91 (1997)), pluronic polymers, and killed mycobacteria. Another adjuvant is CpG (WO 98/40100). Adjuvants can be administered as a component of a therapeutic composition with an active agent or can be administered separately, before, concurrently with, or after administration of the therapeutic agent.

[0269] Other adjuvants contemplated for the invention are saponin adjuvants, such as Stimulon™ (QS-21, Aquila, Framingham, MA) or particles generated therefrom such as ISCOMs (immunostimulating complexes) and ISCOMATRIX. Other adjuvants include RC-529, GM-CSF and Complete Freund's Adjuvant (CFA) and Incomplete Freund's Adjuvant (IFA). Other adjuvants include cytokines, such as interleukins (e.g., IL-1 α and β peptides, IL-2, IL-4, IL-6, IL-12, IL-13, and IL-15), macrophage colony stimulating factor (M-CSF), granulocyte-macrophage colony stimulating factor (GM-CSF), tumor necrosis factor (TNF), chemokines, such as MIP1α and β and RANTES. Another class of adjuvants is glycolipid analogues including N-glycosylamides, N-glycosylureas and N-glycosylcarbamates, each of which is substituted in the sugar residue by an amino acid, as immuno-modulators or adjuvants (see U.S. Pat. No. 4,855,283). Heat shock proteins, e.g., HSP70 and HSP90, may also be used as adjuvants.

[0270] Suitable formulations for rectal administration include, for example, suppositories, which consist of the packaged nucleic acid with a suppository base. Suitable suppository bases include natural or synthetic triglycerides or paraffin hydrocarbons. In addition, it is also possible to use gelatin rectal capsules which consist of a combination of the compound of choice with a base, including, for example, liquid triglycerides, polyethylene glycols, and paraffin hydrocarbons.

[0271] Formulations suitable for parenteral administration, such as, for example, by intraarticular (in the joints), intravenous, intramuscular, intratumoral, intradermal, intraperitoneal, and subcutaneous routes, include aqueous and non-aqueous, isotonic sterile injection solutions, which can contain antioxidants, buffers, bacteriostats, and solutes that render the formulation isotonic with the blood of the intended recipient, and aqueous and non-aqueous sterile suspensions that can include suspending agents, solubilizers, thickening agents, stabilizers, and preservatives. In the practice of this invention, compositions can be administered, for example, by intravenous infusion, orally, topically, intraperitoneally, intravesically or intrathecally. Parenteral administration, oral administration, and intravenous administration are the preferred methods of administration. The formulations of compounds can be presented in unit-dose or multi-dose sealed containers, such as ampules and vials.

[0272] Injection solutions and suspensions can be prepared from sterile powders, granules, and tablets of the kind previously described. Cells transduced by nucleic acids for ex vivo therapy can also be administered intravenously or parenterally as described above.

[0273] The pharmaceutical preparation is preferably in unit dosage form. In such form the preparation is subdivided into unit doses containing appropriate quantities of the active component. The unit dosage form can be a packaged preparation, the package containing discrete quantities of preparation, such as packeted tablets, capsules, and powders in vials or ampoules. Also, the unit dosage form can be a capsule, tablet, cachet, or lozenge itself, or it can be the appropriate number of any of these in packaged form. The composition can, if desired, also contain other compatible therapeutic agents.

[0274] The combined administration contemplates co-administration, using separate formulations or a single pharmaceutical formulation, and consecutive administration in either order, wherein preferably there is a time period while both (or all) active agents simultaneously exert their biological activities.

[0275] Effective doses of the compositions provided herein vary depending upon many different factors, including means of administration, target site, physiological state of the patient, whether the patient is human or an animal, other medications administered, and whether treatment is prophylactic or therapeutic. However, a person of ordinary skill in the art would immediately recognize appropriate and/or equivalent doses looking at dosages of approved compositions for treating and preventing cancer for guidance.

[0276] As used herein, the term “pharmaceutically acceptable” is used synonymously with “physiologically acceptable” and “pharmacologically acceptable”. A pharmaceutical composition will generally comprise agents for buffering and preservation in storage, and can include buffers and carriers for appropriate delivery, depending on the route of administration. As used herein, the terms “pharmaceutically acceptable” or “pharmacologically acceptable” refer to a material which is not biologically or otherwise undesirable, i.e., the material may be administered to an individual in a formulation or composition without causing any unacceptable biological effects or interacting in a deleterious manner with any of the components of the composition in which it is contained.

[0277] “Pharmaceutically acceptable excipient” and “pharmaceutically acceptable carrier” refer to a substance that aids the administration of an active agent to and absorption by a subject and can be included in the compositions of the present invention without causing a significant adverse toxicological effect on the patient. Non-limiting examples of pharmaceutically acceptable excipients include water, NaCl, normal saline solutions, lactated Ringer's, normal sucrose, normal glucose, binders, fillers, disintegrants, lubricants, coatings, sweeteners, flavors, salt solutions (such as Ringer's solution), alcohols, oils, gelatins, carbohydrates such as lactose, amylose or starch, fatty acid esters, hydroxymethycellulose, polyvinyl pyrrolidine, and colors, and the like. Such preparations can be sterilized and, if desired, mixed with auxiliary agents such as lubricants, preservatives, stabilizers, wetting agents, emulsifiers, salts for influencing osmotic pressure, buffers, coloring, and/or aromatic substances, and the like, that do not deleteriously react with the compounds of the invention. One of skill in the art will recognize that other pharmaceutical excipients are useful in the present invention.

[0278] The term “pharmaceutically acceptable salt” refers to salts derived from a variety of organic and inorganic counter ions well known in the art and include, by way of example only, sodium, potassium, calcium, magnesium, ammonium, tetraalkylammonium, and the like; and when the molecule contains a basic functionality, salts of organic or inorganic acids, such as hydrochloride, hydrobromide, tartrate, mesylate, acetate, maleate, oxalate and the like.

[0279] The term “preparation” is intended to include the formulation of the active compound with encapsulating material as a carrier providing a capsule in which the active component with or without other carriers, is surrounded by a carrier, which is thus in association with it. Similarly, cachets and lozenges are included. Tablets, powders, capsules, pills, cachets, and lozenges can be used as solid dosage forms suitable for oral administration.

[0280] The pharmaceutical preparation is optionally in unit dosage form. In such form the preparation is subdivided into unit doses containing appropriate quantities of the active component. The unit dosage form can be a packaged preparation, the package containing discrete quantities of preparation, such as packeted tablets, capsules, and powders in vials or ampoules. Also, the unit dosage form can be a capsule, tablet, cachet, or lozenge itself, or it can be the appropriate number of any of these in packaged form. The unit dosage form can be of a frozen dispersion.

[0281] The compositions of the present invention may additionally include components to provide sustained release and/or comfort. Such components include high molecular weight, anionic mucomimetic polymers, gelling polysaccharides and finely-divided drug carrier substrates. These components are discussed in greater detail in U.S. Pat. Nos. 4,911,920; 5,403,841; 5,212,162; and 4,861,760. The entire contents of these patents are incorporated herein by reference in their entirety for all purposes. The compositions of the present invention can also be delivered as microspheres for slow release in the body. For example, microspheres can be administered via intradermal injection of drug-containing microspheres, which slowly release subcutaneously (see Rao, J. Biomater Sci. Polym. Ed. 7:623-645, 1995; as biodegradable and injectable gel formulations (see, e.g., Gao Pharm. Res. 12:857-863, 1995); or, as microspheres for oral administration (see, e.g., Eyles, J. Pharm. Pharmacol. 49:669-674, 1997). In embodiments, the formulations of the compositions of the present invention can be delivered by the use of liposomes which fuse with the cellular membrane or are endocytosed, i.e., by employing receptor ligands attached to the liposome, that bind to surface membrane protein receptors of the cell resulting in endocytosis. By using liposomes, particularly where the liposome surface carries receptor ligands specific for target cells, or are otherwise preferentially directed to a specific organ, one can focus the delivery of the compositions of the present invention into the target cells in vivo. (See, e.g., Al-Muhammed, J. Microencapsul. 13:293-306, 1996; Chonn, Curr. Opin. Biotechnol. 6:698-708, 1995; Ostro, Am. J. Hosp. Pharm. 46:1576-1587, 1989). The compositions of the present invention can also be delivered as nanoparticles.

[0282] The present invention describes methods utilizing and compositions comprising or expressing T cell epitopes, T cell epitope-containing peptides, and T cell epitope-containing proteins associated with binding to a subset of the naturally occurring MHC Class II and/or MHC Class I molecules within the human population. Compositions comprising or expressing one or more of the disclosed peptides (e.g., the amino acid sequences set forth in any one of Tables 1-20) or polynucleotides encoding the same, covering different HLA Class II and/or MHC Class I alleles, capable of generating a treatment acting broadly on a population level are disclosed herein. As the antigen repertoire of MHC Class I and MHC Class II alleles varies from one individual to another and from one ethnic population to another, it is challenging to provide vaccines or peptide or epitopes-based immunotherapies that can be offered to subjects of any geographic region in the world or provide sufficient protection against infection across a wide segment of the populations unless numerous epitopes or peptides are included (e.g., in a vaccine). Taking into consideration the need for a single vaccine formulation that can provide protection across populations, if it desirable to provide a treatment containing or expressing proteins, peptides or epitopes that will provide protection against infection amongst the majority of the worldwide population. Also, taking into consideration the enormous costs and risks in the clinical development of new treatments and the increasing demands from regulatory bodies to meet high standards for toxicity testing, dose justification, safety and efficacy trials, it is desirable to provide treatments containing or expressing as few peptides as possible, but at the same time to be able to treat the majority of subjects in a worldwide population with a single immunotherapy. Such a product should comprise as a first requirement an expression or inclusion of combination of epitopes or peptides that are able to bind the worldwide MHC Class I and/or MHC Class II allele repertoire, and the resulting peptide-MHC complexes should as a second requirement be recognized by the T cells of the subject so as to induce the desired immunological reactions.

[0283] It is an object of claims of the present invention to provide improved epitope or peptide combinations for modulating an immune response, for treating a subject for an infection or aberrant immune response, and for use in diagnostic methods and kits comprising such peptide combinations. It is another object of the invention to provide epitope or peptide combinations exhibiting very good HLA Class I and Class II coverage in a worldwide population and being immunologically potent in a worldwide population. It is another object of the invention to provide epitope or peptide combinations having good cross reactivity to other strains, including co-circulating strains (for example, mutants) of Bordetella, including B. pertussis, etc. It is another object of the invention to provide epitope or peptide combinations of a relatively small number of epitopes or peptides yet obtaining at least 70%, and more preferably around 90-100% donor coverage in a donor cohort representative of a worldwide population. In certain embodiments, this is achieved by selecting one or more immunodominant and/or immunoprevalent proteins (e.g., a B. pertussis protein) or subsequences, portions, homologues, variants or derivatives thereof for use in the methods and compositions of the present disclosure, wherein said immunodominant and/or immunoprevalent proteins or subsequences, portions, homologues, variants or derivatives thereof comprise two or more epitopes that are immunodominant and/or immunoprevalant. In some embodiments, the two or more epitopes comprise two to ten epitopes and/or polynucleotides encoding the same. Another object of the invention is to provide epitope combinations which are so immunologically potent that even at very low doses of epitopes, the percentage of responding donors can be retained at a very high level in a donor cohort representative of a worldwide population. Another object of the invention is to provide epitope combinations which have minor risk of inducing IgE-mediated adverse events. An additional object of the invention is to provide proteins, peptides, or nucleic acids containing or expressing epitopes or combinations of such proteins, peptides or nucleic acids which have a sufficient solubility profile for being formulated in a pharmaceutical product, preferably which have acceptable estimated in vivo stability. One further objective of the invention is to select epitopes for use in the compositions and methods described herein, based on one or both of their immunodominance or immunoprevalence. A still further object of the invention is to select such epitopes and epitopes combinations not only in accordance with those embodiments previously described, but also those epitopes and epitope combinations capable of eliciting a B cell response and T cell response (e.g., selecting one or more peptides for use in the methods and compositions described herein capable of generating a T cell and antibody response in a subject).

[0284] Provided herein are methods and compositions for diagnosing, treating, and immunizing against a Bordetella, including methods and compositions of detecting an immune response or immune cells relevant to a Bordetella infection. These methods and compositions include vaccines, diagnostics, therapies, reagents and kits, for modulating, eliciting, or detecting T cells responsive to one or more Bordetella peptides or proteins. The proteins and peptides described herein comprise, consist of, or consist essentially of: one or more amino acid sequences selected from any one of those sequences set forth in Tables 1-20, or a subsequence, portion, homologue, variant or derivative thereof, a fusion protein comprising one or more amino acid sequences selected from any one of those sequences set forth in Tables 1-20; a pool of 2 or more peptides selected from the amino acid sequences set forth in any one of Tables 1-20, or a polynucleotide that encodes one or more peptides or proteins, comprising, consisting of, or consisting essentially of an amino acid sequence selected from any one of those sequences set forth in Tables 1-20, or a subsequence, portion, homologue, variant or derivative thereof. In certain preferred embodiments, the Bordetella is one or more of B. pertussis or a variant thereof. Further description and embodiments of such methods and compositions are provided in the definitions provided herein, and a person skilled in the art will recognize that the methods and compositions can be embodied in numerous variations, changes, and substitutions or as may occur to or be understood by one skilled in the art without departing from the invention.

[0285] It is contemplated that any embodiment discussed in this specification can be implemented with respect to any method, kit, reagent, or composition of the invention, and vice versa. Furthermore, compositions of the invention can be used to achieve methods of the invention.

[0286] It will be understood that particular embodiments described herein are shown byway of illustration and not as limitations of the invention. The principal features of this invention can be employed in various embodiments without departing from the scope of the invention. Those skilled in the art will recognize, or be able to ascertain using no more than routine experimentation, numerous equivalents to the specific procedures described herein. Such equivalents are considered to be within the scope of this invention and are covered by the claims.

[0287] All publications and patent applications mentioned in the specification are indicative of the level of skill of those skilled in the art to which this invention pertains. All publications and patent applications are herein incorporated by reference to the same extent as if each individual publication or patent application was specifically and individually indicated to be incorporated by reference.

[0288] The use of the word “a” or “an” when used in conjunction with the term “comprising” in the claims and/or the specification may mean “one,” but it is also consistent with the meaning of “one or more,” “at least one,” and “one or more than one.” The use of the term “or” in the claims is used to mean “and/or” unless explicitly indicated to refer to alternatives only or the alternatives are mutually exclusive, although the disclosure supports a definition that refers to only alternatives and “and/or.” Throughout this application, the term “about” is used to indicate that a value includes the inherent variation of error for the device, the method being employed to determine the value, or the variation that exists among the study subjects.

[0289] As used in this specification and claim(s), the words “comprising” (and any form of comprising, such as “comprise” and “comprises”), “having” (and any form of having, such as “have” and “has”), “including” (and any form of including, such as “includes” and “include”) or “containing” (and any form of containing, such as “contains” and “contain”) are inclusive or open-ended and do not exclude additional, unrecited elements or method steps. In embodiments of any of the compositions and methods provided herein, “comprising” may be replaced with “consisting essentially of” or “consisting of”. As used herein, the phrase “consisting essentially of” requires the specified integer(s) or steps as well as those that do not materially affect the character or function of the claimed invention. As used herein, the term “consisting” is used to indicate the presence of the recited integer (e.g., a feature, an element, a characteristic, a property, a method/process step or a limitation) or group of integers (e.g., feature(s), element(s), characteristic(s), propertie(s), method/process steps or limitation(s)) only.

[0290] The term “or combinations thereof” as used herein refers to all permutations and combinations of the listed items preceding the term. For example, “A, B, C, or combinations thereof” is intended to include at least one of: A, B, C, AB, AC, BC, or ABC, and if order is important in a particular context, also BA, CA, CB, CBA, BCA, ACB, BAC, or CAB. Continuing with this example, expressly included are combinations that contain repeats of one or more item or term, such as BB, AAA, AB, BBC, AAABCCCC, CBBAAA, CABABB, and so forth. The skilled artisan will understand that typically there is no limit on the number of items or terms in any combination, unless otherwise apparent from the context.

[0291] As used herein, words of approximation such as, without limitation, “about”, “substantial” or “substantially” refers to a condition that when so modified is understood to not necessarily be absolute or perfect but would be considered close enough to those of ordinary skill in the art to warrant designating the condition as being present. The extent to which the description may vary will depend on how great a change can be instituted and still have one of ordinary skilled in the art recognize the modified feature as still having the required characteristics and capabilities of the unmodified feature. In general, but subject to the preceding discussion, a numerical value herein that is modified by a word of approximation such as “about” may vary from the stated value by at least ±1, 2, 3, 4, 5, 6, 7, 10, 12 or 15%.

[0292] Additionally, the section headings herein are provided for consistency with the suggestions under 37 CFR 1.77 or otherwise to provide organizational cues. These headings shall not limit or characterize the invention(s) set out in any claims that may issue from this disclosure. Specifically, and by way of example, although the headings refer to a “Field of Invention,” such claims should not be limited by the language under this heading to describe the so-called technical field. Further, a description of technology in the “Background of the Invention” section is not to be construed as an admission that technology is prior art to any invention(s) in this disclosure. Neither is the “Summary” to be considered a characterization of the invention(s) set forth in issued claims. Furthermore, any reference in this disclosure to “invention” in the singular should not be used to argue that there is only a single point of novelty in this disclosure. Multiple inventions may be set forth according to the limitations of the multiple claims issuing from this disclosure, and such claims accordingly define the invention(s), and their equivalents, that are protected thereby. In all instances, the scope of such claims shall be considered on their own merits in light of this disclosure, but should not be constrained by the headings set forth herein.

[0293] All of the compositions and/or methods disclosed and claimed herein can be made and executed without undue experimentation in light of the present disclosure. While the compositions and methods of this invention have been described in terms of preferred embodiments, it will be apparent to those of skill in the art that variations may be applied to the compositions and/or methods and in the steps or in the sequence of steps of the method described herein without departing from the concept, spirit and scope of the invention. All such similar substitutes and modifications apparent to those skilled in the art are deemed to be within the spirit, scope and concept of the invention as defined by the appended claims.

[0294] To aid the Patent Office, and any readers of any patent issued on this application in interpreting the claims appended hereto, applicants wish to note that they do not intend any of the appended claims to invoke paragraph 6 of 35 U.S.C. § 112, U.S.C. § 112 paragraph (f), or equivalent, as it exists on the date of filing hereof unless the words “means for” or “step for” are explicitly used in the particular claim.

[0295] For each of the claims, each dependent claim can depend both from the independent claim and from each of the prior dependent claims for each and every claim so long as the prior claim provides a proper antecedent basis for a claim term or element.

The application's sequence listing, which the Patent Office published only in electronic form, follows.

SEQUENCE LISTING (2627 sequences)

SEQ ID NO: 1 - protein, 16 aa, Bordetella pertussis
GADLIIANPNGISVNG

SEQ ID NO: 2 - protein, 16 aa, Bordetella pertussis
VVARLVKLQGAVSSKQ

SEQ ID NO: 3 - protein, 16 aa, Bordetella pertussis
GKPLADIAVVAGANRY

SEQ ID NO: 4 - protein, 16 aa, Bordetella pertussis
VVAGANRYDHATRRAT

SEQ ID NO: 5 - protein, 16 aa, Bordetella pertussis
DHATRRATPIAAGARG

SEQ ID NO: 6 - protein, 16 aa, Bordetella pertussis
SSDSGLGVRQLGSLSS

SEQ ID NO: 7 - protein, 16 aa, Bordetella pertussis
RQLGSLSSPSAITVSS

SEQ ID NO: 8 - protein, 16 aa, Bordetella pertussis
GQVRATSAGAMTVRDV

SEQ ID NO: 9 - protein, 16 aa, Bordetella pertussis
GFLKSAGAMTVNGRDA

SEQ ID NO: 10 - protein, 16 aa, Bordetella pertussis
VRLDGAHAGGQLRVSS

SEQ ID NO: 11 - protein, 16 aa, Bordetella pertussis
VAELKSLDNISVTGGE

SEQ ID NO: 12 - protein, 16 aa, Bordetella pertussis
NISVTGGERVSVQSVN

SEQ ID NO: 13 - protein, 16 aa, Bordetella pertussis
RVSVQSVNSASRVAIS

SEQ ID NO: 14 - protein, 16 aa, Bordetella pertussis
IDVRGGSTVAANSLHA

SEQ ID NO: 15 - protein, 16 aa, Bordetella pertussis
RSMTLGIVDTTGDLQA

SEQ ID NO: 16 - protein, 16 aa, Bordetella pertussis
SASRARIDSTGSVGIG

SEQ ID NO: 17 - protein, 16 aa, Bordetella pertussis
KVAKKLFLNGTLRAVN

SEQ ID NO: 18 - protein, 16 aa, Bordetella pertussis
SVVSDAALVADGGPIV

SEQ ID NO: 19 - protein, 16 aa, Bordetella pertussis
QRIEAQRIENRGTFQS

SEQ ID NO: 20 - protein, 16 aa, Bordetella pertussis
AAQVTQRGGAANLTSR

SEQ ID NO: 21 - protein, 16 aa, Bordetella pertussis
HDTRFSNKIRLMGPLQ

SEQ ID NO: 22 - protein, 16 aa, Bordetella pertussis
IRLMGPLQVNAGGAVS

SEQ ID NO: 23 - protein, 16 aa, Bordetella pertussis
TSRGGFDNEGKMESNK

SEQ ID NO: 24 - protein, 16 aa, Bordetella pertussis
FTVQAQRIDNSGTMAA

SEQ ID NO: 25 - protein, 16 aa, Bordetella pertussis
PHLRNTGQVVAGHDIH

SEQ ID NO: 26 - protein, 16 aa, Bordetella pertussis
VVAGHDIHIINSAKLE

SEQ ID NO: 27 - protein, 16 aa, Bordetella pertussis
IINSAKLENTGRVDAR

SEQ ID NO: 28 - protein, 16 aa, Bordetella pertussis
NDIALDVADFTNTGSL

SEQ ID NO: 29 - protein, 16 aa, Bordetella pertussis
DFTNTGSLYAEHDATL

SEQ ID NO: 30 - protein, 16 aa, Bordetella pertussis
ILPVAEGTLRVKAKSL

SEQ ID NO: 31 - protein, 16 aa, Bordetella pertussis
LRVKAKSLTTEIETGN

SEQ ID NO: 32 - protein, 16 aa, Bordetella pertussis
PGSLIAEVQENIDNKQ

SEQ ID NO: 33 - protein, 16 aa, Bordetella pertussis
VANEANALLWAAGELT

SEQ ID NO: 34 - protein, 16 aa, Bordetella pertussis
LWAAGELTVKAQNITN

SEQ ID NO: 35 - protein, 16 aa, Bordetella pertussis
VKAQNITNKRAALIEA

SEQ ID NO: 36 - protein, 16 aa, Bordetella pertussis
AVALLNKLGRIRAGED

SEQ ID NO: 37 - protein, 16 aa, Bordetella pertussis
MHLDAPRIENTAKLSG

SEQ ID NO: 38 - protein, 16 aa, Bordetella pertussis
GKKAGTIAAPWYGGDL

SEQ ID NO: 39 - protein, 16 aa, Bordetella pertussis
VGKDLYLNAGARKDEH

SEQ ID NO: 40 - protein, 16 aa, Bordetella pertussis
ELLDYLLDQNRYEYIW

SEQ ID NO: 41 - protein, 16 aa, Bordetella pertussis
QNRYEYIWGLYPTYTE

SEQ ID NO: 42 - protein, 16 aa, Bordetella pertussis
RGHTLESAEGRKIFGE

SEQ ID NO: 43 - protein, 16 aa, Bordetella pertussis
EGRKIFGEYKKLQGEY

SEQ ID NO: 44 - protein, 16 aa, Bordetella pertussis
GGMDAETKEVDGIIQE

SEQ ID NO: 45 - protein, 16 aa, Bordetella pertussis
EVDGIIQEFAADLRTV

SEQ ID NO: 46 - protein, 16 aa, Bordetella pertussis
FAADLRTVYAKQADQA

SEQ ID NO: 47 - protein, 16 aa, Bordetella pertussis
VAQRYKSQIDAVRLQA

SEQ ID NO: 48 - protein, 16 aa, Bordetella pertussis
IDAVRLQAIQPGRVTL

SEQ ID NO: 49 - protein, 16 aa, Bordetella pertussis
IQPGRVTLAKALSAAL

SEQ ID NO: 50 - protein, 16 aa, Bordetella pertussis
GAEIAFYPKEQTVLAA

SEQ ID NO: 51 - protein, 16 aa, Bordetella pertussis
GAIHNGENAAQNRGRP

SEQ ID NO: 52 - protein, 16 aa, Bordetella pertussis
DALAAVLVNPHIFTRI

SEQ ID NO: 53 - protein, 16 aa, Bordetella pertussis
NPHIFTRIGAAQTSLA

SEQ ID NO: 54 - protein, 16 aa, Bordetella pertussis
LASLASLDAAQGLEVS

SEQ ID NO: 55 - protein, 16 aa, Bordetella pertussis
AARVAGDNYFDTTLVR

SEQ ID NO: 56 - protein, 16 aa, Bordetella pertussis
GKPLADIAVIAGANRY

SEQ ID NO: 57 - protein, 16 aa, Bordetella pertussis
HADDGTIVITGTITDT

SEQ ID NO: 58 - protein, 16 aa, Bordetella pertussis
VQVRISNLNDSKITMG

SEQ ID NO: 59 - protein, 16 aa, Bordetella pertussis
TMRYLASYVKKNGDVE

SEQ ID NO: 60 - protein, 16 aa, Bordetella pertussis
EASAITTYVGFSVVYP

SEQ ID NO: 61 - protein, 16 aa, Bordetella pertussis
ANDGTIVITGSISDQT

SEQ ID NO: 62 - protein, 16 aa, Bordetella pertussis
FRLANLNGQHIRMGTD

SEQ ID NO: 63 - protein, 16 aa, Bordetella pertussis
SKSYTLRYLASYVKKP

SEQ ID NO: 64 - protein, 16 aa, Bordetella pertussis
DAAQITSYVGFSVVYP

SEQ ID NO: 65 - protein, 16 aa, Bordetella pertussis
TTLAMALGALGAAPAA

SEQ ID NO: 66 - protein, 16 aa, Bordetella pertussis
ALGAAPAAHADWNNQS

SEQ ID NO: 67 - protein, 16 aa, Bordetella pertussis
HADWNNQSIVKTGERQ

SEQ ID NO: 68 - protein, 16 aa, Bordetella pertussis
IVKTGERQHGIHIQGS

SEQ ID NO: 69 - protein, 16 aa, Bordetella pertussis
HGIHIQGSDPGGVRTA

SEQ ID NO: 70 - protein, 16 aa, Bordetella pertussis
GRQAQGILLENPAAEL

SEQ ID NO: 71 - protein, 16 aa, Bordetella pertussis
GIRRFLGTVTVKAGKL

SEQ ID NO: 72 - protein, 16 aa, Bordetella pertussis
VTVKAGKLVADHATLA

SEQ ID NO: 73 - protein, 16 aa, Bordetella pertussis
NVGDTWDDDGIALYVA

SEQ ID NO: 74 - protein, 16 aa, Bordetella pertussis
DGIALYVAGEQAQASI

SEQ ID NO: 75 - protein, 16 aa, Bordetella pertussis
GEQAQASIADSTLQGA

SEQ ID NO: 76 - protein, 16 aa, Bordetella pertussis
ADSTLQGAGGVQIERG

SEQ ID NO: 77 - protein, 16 aa, Bordetella pertussis
GGVQIERGANVTVQRS

SEQ ID NO: 78 - protein, 16 aa, Bordetella pertussis
ANVTVQRSAIVDGGLH

SEQ ID NO: 79 - protein, 16 aa, Bordetella pertussis
PEDLPPSRVVLRDTNV

SEQ ID NO: 80 - protein, 16 aa, Bordetella pertussis
VVLRDTNVTAVPASGA

SEQ ID NO: 81 - protein, 16 aa, Bordetella pertussis
TAVPASGAPAAVSVLG

SEQ ID NO: 82 - protein, 16 aa, Bordetella pertussis
GHITGGRAAGVAAMQG

SEQ ID NO: 83 - protein, 16 aa, Bordetella pertussis
AGVAAMQGAVVHLQRA

SEQ ID NO: 84 - protein, 16 aa, Bordetella pertussis
AVVHLQRATIRRGDAP

SEQ ID NO: 85 - protein, 16 aa, Bordetella pertussis
TIRRGDAPAGGAVPGG

SEQ ID NO: 86 - protein, 16 aa, Bordetella pertussis
AGGAVPGGAVPGGAVP

SEQ ID NO: 87 - protein, 16 aa, Bordetella pertussis
AVPGGAVPGGFGPGGF

SEQ ID NO: 88 - protein, 16 aa, Bordetella pertussis
GPVLDGWYGVDVSGSS

SEQ ID NO: 89 - protein, 16 aa, Bordetella pertussis
VELAQSIVEAPELGAA

SEQ ID NO: 90 - protein, 16 aa, Bordetella pertussis
EAPELGAAIRVGRGAR

SEQ ID NO: 91 - protein, 16 aa, Bordetella pertussis
SAPHGNVIETGGARRF

SEQ ID NO: 92 - protein, 16 aa, Bordetella pertussis
ETGGARRFAPQAAPLS

SEQ ID NO: 93 - protein, 16 aa, Bordetella pertussis
APQAAPLSITLQAGAH

SEQ ID NO: 94 - protein, 16 aa, Bordetella pertussis
AQGKALLYRVLPEPVK

SEQ ID NO: 95 - protein, 16 aa, Bordetella pertussis
SIGPLDVALASQARWT

SEQ ID NO: 96 - protein, 16 aa, Bordetella pertussis
LASQARWTGATRAVDS

SEQ ID NO: 97 - protein, 16 aa, Bordetella pertussis
GATRAVDSLSIDNATW

SEQ ID NO: 98 - protein, 16 aa, Bordetella pertussis
LSIDNATWVMTDNSNV

SEQ ID NO: 99 - protein, 16 aa, Bordetella pertussis
AEAGRFKVLTVNTLAG

SEQ ID NO: 100 - protein, 16 aa, Bordetella pertussis
LTVNTLAGSGLFRMNV

SEQ ID NO: 101 - protein, 16 aa, Bordetella pertussis
RNSGSEPASANTLLLV

SEQ ID NO: 102 - protein, 16 aa, Bordetella pertussis
PAGRELSAAANAAVNT

SEQ ID NO: 103 - protein, 16 aa, Bordetella pertussis
LFDDGIRRFLGTVTVK

SEQ ID NO: 104 - protein, 16 aa, Bordetella pertussis
AGGGVPGGAVPGGAVP

SEQ ID NO: 105 - protein, 16 aa, Bordetella pertussis
VYRYDSRPPEDVFQNG

SEQ ID NO: 106 - protein, 16 aa, Bordetella pertussis
NVLDHLTGRSCQVGSS

SEQ ID NO: 107 - protein, 16 aa, Bordetella pertussis
NSAFVSTSSSRRYTEV

SEQ ID NO: 108 - protein, 16 aa, Bordetella pertussis
SSRRYTEVYLEHRMQE

SEQ ID NO: 109 - protein, 16 aa, Bordetella pertussis
YLEHRMQEAVEAERAG

SEQ ID NO: 110 - protein, 16 aa, Bordetella pertussis
SYFEYVDTYGDNAGRI

SEQ ID NO: 111 - protein, 16 aa, Bordetella pertussis
YGDNAGRILAGALATY

SEQ ID NO: 112 - protein, 16 aa, Bordetella pertussis
LAGALATYQSEYLAHR

SEQ ID NO: 113 - protein, 16 aa, Bordetella pertussis
QSEYLAHRRIPPENIR

SEQ ID NO: 114 - protein, 16 aa, Bordetella pertussis
RIPPENIRRVTRVYHN

SEQ ID NO: 115 - protein, 16 aa, Bordetella pertussis
RVTRVYHNGITGETTT

SEQ ID NO: 116 - protein, 16 aa, Bordetella pertussis
GITGETTTTEYSNARY

SEQ ID NO: 117 - protein, 16 aa, Bordetella pertussis
PNPYTSRRSVASIVGT

SEQ ID NO: 118 - protein, 16 aa, Bordetella pertussis
WSERAGEAMVLVYYES

SEQ ID NO: 119 - protein, 16 aa, Bordetella pertussis
GEAMVLVYYESIAYSF

SEQ ID NO: 120 - protein, 16 aa, Bordetella pertussis
SVASIVGTLVRMAPVM

SEQ ID NO: 121 - protein, 16 aa, Bordetella pertussis
YYSNVTATRLLSSTNS

SEQ ID NO: 122 - protein, 16 aa, Bordetella pertussis
RLCAVFVRSGQPVIGA

SEQ ID NO: 123 - protein, 16 aa, Bordetella pertussis
SGQPVIGACTSPYDGK

SEQ ID NO: 124 - protein, 16 aa, Bordetella pertussis
CTSPYDGKYWSMYSRL

SEQ ID NO: 125 - protein, 16 aa, Bordetella pertussis
YWSMYSRLRKMLYLIY

SEQ ID NO: 126 - protein, 16 aa, Bordetella pertussis
RKMLYLIYVAGISVRV

SEQ ID NO: 127 - protein, 16 aa, Bordetella pertussis
HVSKEEQYYDYEDATF

SEQ ID NO: 128 - protein, 16 aa, Bordetella pertussis
TQHGSPYGRCANKTRA

SEQ ID NO: 129 - protein, 16 aa, Bordetella pertussis
HYYSKVTATRLLASTN

SEQ ID NO: 130 - protein, 16 aa, Bordetella pertussis
SRLCAVFVRDGQSVIG

SEQ ID NO: 131 - protein, 16 aa, Bordetella pertussis
VHVSKEEQYYDYEDAT

SEQ ID NO: 132 - protein, 16 aa, Bordetella pertussis
VYKYDSRPPEDVFQNG

SEQ ID NO: 133 - protein, 15 aa, Bordetella pertussis
MGVDGLRLDAVPYLV

SEQ ID NO: 134 - protein, 15 aa, Bordetella pertussis
LMPEFISSLAIAGVD

SEQ ID NO: 135 - protein, 15 aa, Bordetella pertussis
LSLVVQEINGPRLAT

SEQ ID NO: 136 - protein, 15 aa, Bordetella pertussis
RLLFTPDAAARKWVP

SEQ ID NO: 137 - protein, 15 aa, Bordetella pertussis
AMKRAMQNAMRLGAQ

SEQ ID NO: 138 - protein, 15 aa, Bordetella pertussis
FTHIELLPVMAHPFG

SEQ ID NO: 139 - protein, 15 aa, Bordetella pertussis
IQRFVQAWPVVSSRL

SEQ ID NO: 140 - protein, 15 aa, Bordetella pertussis
QTPFHLVSSERSLTG

SEQ ID NO: 141 - protein, 15 aa, Bordetella pertussis
NGFITAYAHNRALLV

SEQ ID NO: 142 - protein, 15 aa, Bordetella pertussis
MEVFYGTVAVRVPLS

SEQ ID NO: 143 - protein, 15 aa, Bordetella pertussis
ALLRELRLRGVKQIG

SEQ ID NO: 144 - protein, 15 aa, Bordetella pertussis
PWILWVHDLSVRDPF

SEQ ID NO: 145 - protein, 15 aa, Bordetella pertussis
ASVMKLVTTWAALSE

SEQ ID NO: 146 - protein, 15 aa, Bordetella pertussis
FTGVVDLVKMKAIIW

SEQ ID NO: 147 - protein, 15 aa, Bordetella pertussis
IRSRIKVKSLNFMRG

SEQ ID NO: 148 - protein, 15 aa, Bordetella pertussis
VKRFGRFVGRRRNER

SEQ ID NO: 149 - protein, 15 aa, Bordetella pertussis
MMVRFFVSIGVLAWA

SEQ ID NO: 150 - protein, 15 aa, Bordetella pertussis
SRAILLSTVLSVPTI

SEQ ID NO: 151 - protein, 15 aa, Bordetella pertussis
QEYVFLTYALDSDVI

SEQ ID NO: 152 - protein, 15 aa, Bordetella pertussis
VVLALVRNALGVQQV

SEQ ID NO: 153 - protein, 15 aa, Bordetella pertussis
GWLTIIAKPLFTLMT

SEQ ID NO: 154 - protein, 15 aa, Bordetella pertussis
AIAWLVVAARAWRRR

SEQ ID NO: 155 - protein, 15 aa, Bordetella pertussis
ENLKADLQRLMGVPV

SEQ ID NO: 156 - protein, 15 aa, Bordetella pertussis
IAYRLLTHNRALTLF

SEQ ID NO: 157 - protein, 15 aa, Bordetella pertussis
QVLREVLGAMRYWLD

SEQ ID NO: 158 - protein, 15 aa, Bordetella pertussis
VPSLSILAEPPVAVV

SEQ ID NO: 159 - protein, 15 aa, Bordetella pertussis
SGGLKVTKTYTLHRG

SEQ ID NO: 160 - protein, 15 aa, Bordetella pertussis
TAVCFLLSLETAMRS

SEQ ID NO: 161 - protein, 15 aa, Bordetella pertussis
VEVRPVRRLALAMRW

SEQ ID NO: 162 - protein, 15 aa, Bordetella pertussis
LPKAFSIYRDTRVWI

SEQ ID NO: 163 - protein, 15 aa, Bordetella pertussis
HPTGFRLAVTRNWTS

SEQ ID NO: 164 - protein, 15 aa, Bordetella pertussis
RLMGLPHYHRLLYAL

SEQ ID NO: 165 - protein, 15 aa, Bordetella pertussis
TFTPIQVASIAALDG

SEQ ID NO: 166 - protein, 15 aa, Bordetella pertussis
MSRHAIRSTLAGLTL

SEQ ID NO: 167 - protein, 15 aa, Bordetella pertussis
HAGPAFKGNVTLAIE

SEQ ID NO: 168 - protein, 15 aa, Bordetella pertussis
KAVFFPLAAASYRSM

SEQ ID NO: 169 - protein, 15 aa, Bordetella pertussis
GLPLTLILATFGIAL

SEQ ID NO: 170 - protein, 15 aa, Bordetella pertussis
TPRLILEGATAHNLN

SEQ ID NO: 171 - protein, 15 aa, Bordetella pertussis
MPYLNLIPNPAPPFV

SEQ ID NO: 172 - protein, 15 aa, Bordetella pertussis
ERRYIIAPRGLEVGA

SEQ ID NO: 173 - protein, 15 aa, Bordetella pertussis
DLKSILIIGAGPIII

SEQ ID NO: 174 - protein, 15 aa, Bordetella pertussis
IFGRDFNEALVHQIV

SEQ ID NO: 175 - protein, 15 aa, Bordetella pertussis
RIPWLDVIPGAIVTA

SEQ ID NO: 176 - protein, 15 aa, Bordetella pertussis
CQMALMENAISRYLN

SEQ ID NO: 177 - protein, 15 aa, Bordetella pertussis
MKRTYQPSVTRRKRT

SEQ ID NO: 178 - protein, 15 aa, Bordetella pertussis
VRAVAGYVLGASGKR

SEQ ID NO: 179 - protein, 15 aa, Bordetella pertussis
QAYLEYLYTPAAQEI

SEQ ID NO: 180 - protein, 15 aa, Bordetella pertussis
GDSWGVLFSHPADFT

SEQ ID NO: 181 - protein, 15 aa, Bordetella pertussis
LSSIALAESNALDKR

SEQ ID NO: 182 - protein, 15 aa, Bordetella pertussis
QIRLPHLRDIGALLT

SEQ ID NO: 183 - protein, 15 aa, Bordetella pertussis
KKVRLTITYPASTGR

SEQ ID NO: 184 - protein, 15 aa, Bordetella pertussis
LRVVKVVYFDDPVDQ

SEQ ID NO: 185 - protein, 15 aa, Bordetella pertussis
QRSILSLNGALILVL

SEQ ID NO: 186 - protein, 15 aa, Bordetella pertussis
AGRGLFVSGTLARLM

SEQ ID NO: 187 - protein, 15 aa, Bordetella pertussis
QAKVMMIMPLVFGGM

SEQ ID NO: 188 - protein, 15 aa, Bordetella pertussis
DFTRLMHANGRIIAA

SEQ ID NO: 189 - protein, 15 aa, Bordetella pertussis
EGVVVAPSRLKSLVI

SEQ ID NO: 190 - protein, 15 aa, Bordetella pertussis
SLNFMRGRTFLNKYL

SEQ ID NO: 191 - protein, 15 aa, Bordetella pertussis
MNAERLMQVILAPIV

SEQ ID NO: 192 - protein, 15 aa, Bordetella pertussis
LDGNGVFVLNTNVAA

SEQ ID NO: 193 - protein, 15 aa, Bordetella pertussis
GWFTMKFVWPPLTKA

SEQ ID NO: 194 - protein, 15 aa, Bordetella pertussis
FSLYRLALSQPEYAS

SEQ ID NO: 195 - protein, 15 aa, Bordetella pertussis
TLGLYHYRHRRVPDY

SEQ ID NO: 196 - protein, 15 aa, Bordetella pertussis
GMPITRFLNAVRVAL

SEQ ID NO: 197 - protein, 15 aa, Bordetella pertussis
NNIRGILKTTAVKAP

SEQ ID NO: 198 - protein, 15 aa, Bordetella pertussis
KAMLEDIAILTGGTV

SEQ ID NO: 199 - protein, 15 aa, Bordetella pertussis
DYVVRLHSKLTPASL

SEQ ID NO: 200 - protein, 15 aa, Bordetella pertussis
SKIAIAMTKAFLAVN

SEQ ID NO: 201 - protein, 15 aa, Bordetella pertussis
KSKYAIDWSPFLGAK

SEQ ID NO: 202 - protein, 15 aa, Bordetella pertussis
DLLWVRLNWARLRRH

SEQ ID NO: 203 - protein, 15 aa, Bordetella pertussis
LVCSLLNLLPPAWII

SEQ ID NO: 204 - protein, 15 aa, Bordetella pertussis
GLTWFAVLGSHAALQ

SEQ ID NO: 205 - protein, 15 aa, Bordetella pertussis
VGRIYRADAKQKKML

SEQ ID NO: 206 - protein, 15 aa, Bordetella pertussis
PFVRDGNLLYISGQV

SEQ ID NO: 207 - protein, 15 aa, Bordetella pertussis
GYTLLFVAVTSAINQ

SEQ ID NO: 208 - protein, 15 aa, Bordetella pertussis
LDMLLFDRSGHRAAL

SEQ ID NO: 209 - protein, 15 aa, Bordetella pertussis
MKRYHVDANQARRVR

SEQ ID NO: 210 - protein, 15 aa, Bordetella pertussis
EKIYVVQTSISVVQR

SEQ ID NO: 211 - protein, 15 aa, Bordetella pertussis
VRRLGVIAINTALEF

SEQ ID NO: 212 - protein, 15 aa, Bordetella pertussis
FLIGILLILVFGVQL

SEQ ID NO: 213 - protein, 15 aa, Bordetella pertussis
EVWLAADSSKFQRQA

SEQ ID NO: 214 - protein, 15 aa, Bordetella pertussis
MSWHWIFLINIPIGI

SEQ ID NO: 215 - protein, 15 aa, Bordetella pertussis
SLLAMLARAHDSPLT

SEQ ID NO: 216 - protein, 15 aa, Bordetella pertussis
MCDFYAVRAENSTLW

SEQ ID NO: 217 - protein, 15 aa, Bordetella pertussis
PDKFDIVVPSLSILA

SEQ ID NO: 218 - protein, 15 aa, Bordetella pertussis
VWGPASLIVSKPIWN

SEQ ID NO: 219 - protein, 15 aa, Bordetella pertussis
LGRLGLRFGRRIALA

SEQ ID NO: 220 - protein, 15 aa, Bordetella pertussis
LFPIFADLTGRRVLV

SEQ ID NO: 221 - protein, 15 aa, Bordetella pertussis
AHWDFLAAMASADLG

SEQ ID NO: 222 - protein, 15 aa, Bordetella pertussis
AERYRFFSYGDAMFI

SEQ ID NO: 223 - protein, 15 aa, Bordetella pertussis
AGIQIFQLAETLQSL

SEQ ID NO: 224 - protein, 15 aa, Bordetella pertussis
AAMLIEIKSRMLLPV

SEQ ID NO: 225 - protein, 15 aa, Bordetella pertussis
RPRLLAMIRSVRDHM

SEQ ID NO: 226 - protein, 15 aa, Bordetella pertussis
QAQLRSIEAAIATYR

SEQ ID NO: 227 - protein, 15 aa, Bordetella pertussis
GEGYVFYENRAYGVA

SEQ ID NO: 228 - protein, 15 aa, Bordetella pertussis
RVAFDGAEPRLVDTS

SEQ ID NO: 229 - protein, 15 aa, Bordetella pertussis
ANRFLRRLWALGYAQ

SEQ ID NO: 230 - protein, 15 aa, Bordetella pertussis
IGRDYASQIAAVRVV

SEQ ID NO: 231 - protein, 15 aa, Bordetella pertussis
LPVMLLADSGLAADR

SEQ ID NO: 232 - protein, 15 aa, Bordetella pertussis
IRIDLRNIRSPIIVF

SEQ ID NO: 233 - protein, 15 aa, Bordetella pertussis
TGLFIVACAAFTPVT

SEQ ID NO: 234 - protein, 15 aa, Bordetella pertussis
WLFLKMLEKGIAYRK

SEQ ID NO: 235 - protein, 15 aa, Bordetella pertussis
GQIDMMFAQLPAVLP

SEQ ID NO: 236 - protein, 15 aa, Bordetella pertussis
VFFLKYLLSSQSAIL

SEQ ID NO: 237 - protein, 15 aa, Bordetella pertussis
SGMRRFWKPSLALVW

SEQ ID NO: 238 - protein, 15 aa, Bordetella pertussis
RAILLKRHNSGFWLI

SEQ ID NO: 239 - protein, 15 aa, Bordetella pertussis
GVLLLQDMAAIPMLV

SEQ ID NO: 240 - protein, 15 aa, Bordetella pertussis
LELVVDYGWLTIIAK

SEQ ID NO: 241 - protein, 15 aa, Bordetella pertussis
AKYQEIVKISGASLN

SEQ ID NO: 242 - protein, 15 aa, Bordetella pertussis
TALVAERTLILSLVT

SEQ ID NO: 243 - protein, 15 aa, Bordetella pertussis
YQRIQYNTVVSACMK

SEQ ID NO: 244 - protein, 15 aa, Bordetella pertussis
IKPVFALSSYRTKES

SEQ ID NO: 245 - protein, 15 aa, Bordetella pertussis
YSSLNVAQALQLAAW

SEQ ID NO: 246 - protein, 15 aa, Bordetella pertussis
LGEFALTRTFKGHAA

SEQ ID NO: 247 - protein, 15 aa, Bordetella pertussis
GYRYRAVDALLTNFH

SEQ ID NO: 248 - protein, 15 aa, Bordetella pertussis
QRLALIVDPMLATGG

SEQ ID NO: 249 - protein, 15 aa, Bordetella pertussis
PLPGMYRDIARRYDV

SEQ ID NO: 250 - protein, 15 aa, Bordetella pertussis
LYQGLELGASTRIAR

SEQ ID NO: 251 - protein, 15 aa, Bordetella pertussis
AVQLMTVHAAKGLEF

SEQ ID NO: 252 - protein, 15 aa, Bordetella pertussis
HGMKILDGALAKVAK

SEQ ID NO: 253 - protein, 15 aa, Bordetella pertussis
ALFVTQSTVSKMIRQ

SEQ ID NO: 254 - protein, 15 aa, Bordetella pertussis
ADVRPLRSATVQRLV

SEQ ID NO: 255 - protein, 15 aa, Bordetella pertussis
GAVPFLLAMLLQVGF

SEQ ID NO: 256 - protein, 15 aa, Bordetella pertussis
ILGFFIIAALDALRV

SEQ ID NO: 257 - protein, 15 aa, Bordetella pertussis
RRGELVRVLPDWRSP

SEQ ID NO: 258 - protein, 15 aa, Bordetella pertussis
SYRSMARMKQVAPRL

SEQ ID NO: 259 - protein, 15 aa, Bordetella pertussis
GALNGILRGVQQPII

SEQ ID NO: 260 - protein, 15 aa, Bordetella pertussis
TAARIAKAPRLKLAI

SEQ ID NO: 261 - protein, 15 aa, Bordetella pertussis
MRLGLLSVMSWLVTL

SEQ ID NO: 262 - protein, 15 aa, Bordetella pertussis
DDLIDQIRQRGIAAL

SEQ ID NO: 263 - protein, 15 aa, Bordetella pertussis
DSDVILTVSGANTYI

SEQ ID NO: 264 - protein, 15 aa, Bordetella pertussis
LRVFESVLVAARAHG

SEQ ID NO: 265 - protein, 15 aa, Bordetella pertussis
FRLIWLYLRMRWLSR

SEQ ID NO: 266 - protein, 15 aa, Bordetella pertussis
RGRKRFVQGLRNRRL

SEQ ID NO: 267 - protein, 15 aa, Bordetella pertussis
PVTLAFALTTRVRDL

SEQ ID NO: 268 - protein, 15 aa, Bordetella pertussis
ELLQVQQNLYAARTI

SEQ ID NO: 269 - protein, 15 aa, Bordetella pertussis
VQAAINAARSLLPTS

SEQ ID NO: 270 - protein, 15 aa, Bordetella pertussis
LGGLFLLFKGTMELH

SEQ ID NO: 271 - protein, 15 aa, Bordetella pertussis
PLIRHKLGIMRRADL

SEQ ID NO: 272 - protein, 15 aa, Bordetella pertussis
FDVIAQAISGMMSIT

SEQ ID NO: 273 - protein, 15 aa, Bordetella pertussis
INIPWSFHAGYRYSF

SEQ ID NO: 274 - protein, 15 aa, Bordetella pertussis
VSDMGPLLLSRMLEL

SEQ ID NO: 275 - protein, 15 aa, Bordetella pertussis
PAGFYYKTFMWPAKF

SEQ ID NO: 276 - protein, 15 aa, Bordetella pertussis
EDGFLRSFGTGRHFP

SEQ ID NO: 277 - protein, 15 aa, Bordetella pertussis
LSWIVYLRRQIRQRK

SEQ ID NO: 278 - protein, 15 aa, Bordetella pertussis
RGRGIALLPSMASEA

SEQ ID NO: 279 - protein, 15 aa, Bordetella pertussis
TANRRLAALRRFYAW

SEQ ID NO: 280 - protein, 15 aa, Bordetella pertussis
ARSIHTVKRLVFVLL

SEQ ID NO: 281 - protein, 15 aa, Bordetella pertussis
TAVMLLLTFVPELVL

SEQ ID NO: 282 - protein, 15 aa, Bordetella pertussis
TTVVNQVAKARAQEI

SEQ ID NO: 283 - protein, 15 aa, Bordetella pertussis
DKVMKHLARLWGFRV

SEQ ID NO: 284 - protein, 15 aa, Bordetella pertussis
APWIWLRYIGATRLG

SEQ ID NO: 285 - protein, 15 aa, Bordetella pertussis
PETHAILRRIRRVID

SEQ ID NO: 286 - protein, 15 aa, Bordetella pertussis
GRVDSIIMRIADVQL

SEQ ID NO: 287 - protein, 15 aa, Bordetella pertussis
DAMRQLQSAPAGPVV

SEQ ID NO: 288 - protein, 15 aa, Bordetella pertussis
PMINLLFTPVVKRFR

SEQ ID NO: 289 - protein, 15 aa, Bordetella pertussis
GKLLDAMLQSVGMSR

SEQ ID NO: 290 - protein, 15 aa, Bordetella pertussis
VYASFWVIVTQIVVL

SEQ ID NO: 291 - protein, 15 aa, Bordetella pertussis
EEMLRFGVMPKIALL

SEQ ID NO: 292 - protein, 15 aa, Bordetella pertussis
FHRLNVIRLRLPPLR

SEQ ID NO: 293 - protein, 15 aa, Bordetella pertussis
FFLCAILYVRPAKRA

SEQ ID NO: 294 - protein, 15 aa, Bordetella pertussis
LPVLDVMQTMPSFVY

SEQ ID NO: 295 - protein, 15 aa, Bordetella pertussis
MKILNAIRRGLALAG

SEQ ID NO: 296 - protein, 15 aa, Bordetella pertussis
LILRFLVGVALAGIY

SEQ ID NO: 297 - protein, 15 aa, Bordetella pertussis
KGKFQMFQIGRIGGY

SEQ ID NO: 298 - protein, 15 aa, Bordetella pertussis
AGAWLVVAATDDRAV

SEQ ID NO: 299 - protein, 15 aa, Bordetella pertussis
KRIMFRRAMKRAMQN

SEQ ID NO: 300 - protein, 15 aa, Bordetella pertussis
PSVYSIMGAIALVSW

SEQ ID NO: 301 - protein, 15 aa, Bordetella pertussis
IALLCYADGERRYII

SEQ ID NO: 302 - protein, 15 aa, Bordetella pertussis
LFKQMLMVSGFDRYY

SEQ ID NO: 303 - protein, 15 aa, Bordetella pertussis
MRRAGKQGKWQQWLA

SEQ ID NO: 304 - protein, 15 aa, Bordetella pertussis
KQGKWQQWLAGVMLA

SEQ ID NO: 305 - protein, 15 aa, Bordetella pertussis
QQWLAGVMLALGAAG

SEQ ID NO: 306 - protein, 15 aa, Bordetella pertussis
GVMLALGAAGAAAQG

SEQ ID NO: 307 - protein, 15 aa, Bordetella pertussis
LGAAGAAAQGLPSSL

SEQ ID NO: 308 - protein, 15 aa, Bordetella pertussis
AAAQGLPSSLVAAWK

SEQ ID NO: 309 - protein, 15 aa, Bordetella pertussis
LPSSLVAAWKATKLP

SEQ ID NO: 310 - protein, 15 aa, Bordetella pertussis
VAAWKATKLPDQSLS

SEQ ID NO: 311 - protein, 15 aa, Bordetella pertussis
ATKLPDQSLSLVVQE

SEQ ID NO: 312 - protein, 15 aa, Bordetella pertussis
DQSLSLVVQEINGPR

SEQ ID NO: 313 - protein, 15 aa, Bordetella pertussis
LVVQEINGPRLATLN

SEQ ID NO: 314 - protein, 15 aa, Bordetella pertussis
INGPRLATLNAKEPR

SEQ ID NO: 315 - protein, 15 aa, Bordetella pertussis
LATLNAKEPRNPASV

SEQ ID NO: 316 - protein, 15 aa, Bordetella pertussis
AKEPRNPASVMKLVT

SEQ ID NO: 317 - protein, 15 aa, Bordetella pertussis
NPASVMKLVTTWAAL

SEQ ID NO: 318 - protein, 15 aa, Bordetella pertussis
MKLVTTWAALSELGP

SEQ ID NO: 319 - protein, 15 aa, Bordetella pertussis
TWAALSELGPSYAWR

SEQ ID NO: 320 - protein, 15 aa, Bordetella pertussis
SELGPSYAWRTEFLT

SEQ ID NO: 321 - protein, 15 aa, Bordetella pertussis
SYAWRTEFLTEPGNR

SEQ ID NO: 322 - protein, 15 aa, Bordetella pertussis
TEFLTEPGNRPDAHG

SEQ ID NO: 323 - protein, 15 aa, Bordetella pertussis
EPGNRPDAHGVLRGP

SEQ ID NO: 324 - protein, 15 aa, Bordetella pertussis
PDAHGVLRGPLYLRA

SEQ ID NO: 325 - protein, 15 aa, Bordetella pertussis
VLRGPLYLRAGGDPQ

SEQ ID NO: 326 - protein, 15 aa, Bordetella pertussis
LYLRAGGDPQLLLQD

SEQ ID NO: 327 - protein, 15 aa, Bordetella pertussis
GGDPQLLLQDLWALL

SEQ ID NO: 328 - protein, 15 aa, Bordetella pertussis
LLLQDLWALLRELRL

SEQ ID NO: 329 - protein, 15 aa, Bordetella pertussis
LWALLRELRLRGVKQ

SEQ ID NO: 330 - protein, 15 aa, Bordetella pertussis
RELRLRGVKQIGDLV

SEQ ID NO: 331 - protein, 15 aa, Bordetella pertussis
RGVKQIGDLVVDRSI

SEQ ID NO: 332 - protein, 15 aa, Bordetella pertussis
IGDLVVDRSIFGQVA

SEQ ID NO: 333 - protein, 15 aa, Bordetella pertussis
VDRSIFGQVAIDPGA

SEQ ID NO: 334 - protein, 15 aa, Bordetella pertussis
FGQVAIDPGAFDGAS

SEQ ID NO: 335 - protein, 15 aa, Bordetella pertussis
IDPGAFDGASDRAYN

SEQ ID NO: 336 - protein, 15 aa, Bordetella pertussis
FDGASDRAYNASPDA

SEQ ID NO: 337 - protein, 15 aa, Bordetella pertussis
DRAYNASPDALMVGF

SEQ ID NO: 338 - protein, 15 aa, Bordetella pertussis
ASPDALMVGFGAQRL

SEQ ID NO: 339 - protein, 15 aa, Bordetella pertussis
LMVGFGAQRLLFTPD

SEQ ID NO: 340 - protein, 15 aa, Bordetella pertussis
GAQRLLFTPDAAARK

SEQ ID NO: 341 - protein, 15 aa, Bordetella pertussis
LFTPDAAARKWVPMI

SEQ ID NO: 342 - protein, 15 aa, Bordetella pertussis
AAARKWVPMIDPPLP

SEQ ID NO: 343 - protein, 15 aa, Bordetella pertussis
WVPMIDPPLPGLRLE

SEQ ID NO: 344 - protein, 15 aa, Bordetella pertussis
DPPLPGLRLEGAVEW

SEQ ID NO: 345 - protein, 15 aa, Bordetella pertussis
GLRLEGAVEWSDVRC

SEQ ID NO: 346 - protein, 15 aa, Bordetella pertussis
GAVEWSDVRCPGPPV

SEQ ID NO: 347 - protein, 15 aa, Bordetella pertussis
SDVRCPGPPVVGTEP

SEQ ID NO: 348 - protein, 15 aa, Bordetella pertussis
PGPPVVGTEPVVTQQ

SEQ ID NO: 349 - protein, 15 aa, Bordetella pertussis
VGTEPVVTQQGVSIR

SEQ ID NO: 350 - protein, 15 aa, Bordetella pertussis
VVTQQGVSIRLSGKV

SEQ ID NO: 351 - protein, 15 aa, Bordetella pertussis
GVSIRLSGKVAGSCG

SEQ ID NO: 352 - protein, 15 aa, Bordetella pertussis
LSGKVAGSCGEFSLY

SEQ ID NO: 353 - protein, 15 aa, Bordetella pertussis
AGSCGEFSLYRLALS

SEQ ID NO: 354 - protein, 15 aa, Bordetella pertussis
EFSLYRLALSQPEYA

SEQ ID NO: 355 - protein, 15 aa, Bordetella pertussis
RLALSQPEYASAVFR

SEQ ID NO: 356 - protein, 15 aa, Bordetella pertussis
QPEYASAVFRLLWRE

SEQ ID NO: 357 - protein, 15 aa, Bordetella pertussis
SAVFRLLWRELGGTL

SEQ ID NO: 358 - protein, 15 aa, Bordetella pertussis
LLWRELGGTLKGQIR

SEQ ID NO: 359 - protein, 15 aa, Bordetella pertussis
LGGTLKGQIRSGVVP

SEQ ID NO: 360 - protein, 15 aa, Bordetella pertussis
KGQIRSGVVPPDAVV

SEQ ID NO: 361 - protein, 15 aa, Bordetella pertussis
SGVVPPDAVVLASHD

SEQ ID NO: 362 - protein, 15 aa, Bordetella pertussis
PDAVVLASHDSPTLG

SEQ ID NO: 363 - protein, 15 aa, Bordetella pertussis
LASHDSPTLGEAIRT

SEQ ID NO: 364 - protein, 15 aa, Bordetella pertussis
SPTLGEAIRTINKRS

SEQ ID NO: 365 - protein, 15 aa, Bordetella pertussis
EAIRTINKRSNNVMA

SEQ ID NO: 366 - protein, 15 aa, Bordetella pertussis
INKRSNNVMARTLLL

SEQ ID NO: 367 - protein, 15 aa, Bordetella pertussis
NNVMARTLLLTLGAE

SEQ ID NO: 368 - protein, 15 aa, Bordetella pertussis
RTLLLTLGAERGRRP

SEQ ID NO: 369 - protein, 15 aa, Bordetella pertussis
TLGAERGRRPATVES

SEQ ID NO: 370 - protein, 15 aa, Bordetella pertussis
RGRRPATVESSGVVA

SEQ ID NO: 371 - protein, 15 aa, Bordetella pertussis
ATVESSGVVARTVLG

SEQ ID NO: 372 - protein, 15 aa, Bordetella pertussis
SGVVARTVLGAQGLE

SEQ ID NO: 373 - protein, 15 aa, Bordetella pertussis
RTVLGAQGLEMPELV

SEQ ID NO: 374 - protein, 15 aa, Bordetella pertussis
AQGLEMPELVIDNGS

SEQ ID NO: 375 - protein, 15 aa, Bordetella pertussis
MPELVIDNGSGLSRE

SEQ ID NO: 376 - protein, 15 aa, Bordetella pertussis
IDNGSGLSREGRVSA

SEQ ID NO: 377 - protein, 15 aa, Bordetella pertussis
GLSREGRVSADSLAS

SEQ ID NO: 378 - protein, 15 aa, Bordetella pertussis
GRVSADSLASMLTVA

SEQ ID NO: 379 - protein, 15 aa, Bordetella pertussis
DSLASMLTVAWNSPL

SEQ ID NO: 380 - protein, 15 aa, Bordetella pertussis
MLTVAWNSPLMPEFI

SEQ ID NO: 381 - protein, 15 aa, Bordetella pertussis
WNSPLMPEFISSLAI

SEQ ID NO: 382 - protein, 15 aa, Bordetella pertussis
MPEFISSLAIAGVDG

SEQ ID NO: 383 - protein, 15 aa, Bordetella pertussis
SSLAIAGVDGTVRRR

SEQ ID NO: 384 - protein, 15 aa, Bordetella pertussis
AGVDGTVRRRLKGNG

SEQ ID NO: 385 - protein, 15 aa, Bordetella pertussis
TVRRRLKGNGAQGMA

SEQ ID NO: 386 - protein, 15 aa, Bordetella pertussis
LKGNGAQGMAHLKTG

SEQ ID NO: 387 - protein, 15 aa, Bordetella pertussis
AQGMAHLKTGSLRDV

SEQ ID NO: 388 - protein, 15 aa, Bordetella pertussis
HLKTGSLRDVRAVAG

SEQ ID NO: 389 - protein, 15 aa, Bordetella pertussis
SLRDVRAVAGYVLGA

SEQ ID NO: 390 - protein, 15 aa, Bordetella pertussis
RAVAGYVLGASGKRY

SEQ ID NO: 391 - protein, 15 aa, Bordetella pertussis
YVLGASGKRYVVVSM

SEQ ID NO: 392 - protein, 15 aa, Bordetella pertussis
SGKRYVVVSMVNHEN

SEQ ID NO: 393 - protein, 15 aa, Bordetella pertussis
VVVSMVNHENAAAVR

SEQ ID NO: 394 - protein, 15 aa, Bordetella pertussis
VNHENAAAVRSFDDA

SEQ ID NO: 395 - protein, 15 aa, Bordetella pertussis
AAAVRSFDDALVAWL

SEQ ID NO: 396 - protein, 15 aa, Bordetella pertussis
VRSFDDALVAWLAEQ

SEQ ID NO: 397 - protein, 15 aa, Bordetella pertussis
MDIRRTVLWMIFSFS

SEQ ID NO: 398 - protein, 15 aa, Bordetella pertussis
TVLWMIFSFSLLLLW

SEQ ID NO: 399 - protein, 15 aa, Bordetella pertussis
IFSFSLLLLWNNWQI

SEQ ID NO: 400 - protein, 15 aa, Bordetella pertussis
LLLLWNNWQIHNGKP

SEQ ID NO: 401 - protein, 15 aa, Bordetella pertussis
NNWQIHNGKPSLFGG

SEQ ID NO: 402 - protein, 15 aa, Bordetella pertussis
HNGKPSLFGGPAPEA

SEQ ID NO: 403 - protein, 15 aa, Bordetella pertussis
SLFGGPAPEAAATQQ

SEQ ID NO: 404 - protein, 15 aa, Bordetella pertussis
PAPEAAATQQPKADA

SEQ ID NO: 405 - protein, 15 aa, Bordetella pertussis
AATQQPKADANGTAA

SEQ ID NO: 406 - protein, 15 aa, Bordetella pertussis
PKADANGTAASSTAS

SEQ ID NO: 407 - protein, 15 aa, Bordetella pertussis
NGTAASSTASIPSSP

SEQ ID NO: 408 - protein, 15 aa, Bordetella pertussis
SSTASIPSSPAAAPA

SEQ ID NO: 409 - protein, 15 aa, Bordetella pertussis
IPSSPAAAPAAASVP

SEQ ID NO: 410 - protein, 15 aa, Bordetella pertussis
AAAPAAASVPGAAAP

SEQ ID NO: 411 - protein, 15 aa, Bordetella pertussis
AASVPGAAAPAAAKS

SEQ ID NO: 412 - protein, 15 aa, Bordetella pertussis
GAAAPAAAKSEQVVI

SEQ ID NO: 413 - protein, 15 aa, Bordetella pertussis
AAAKSEQVVITTDVL

SEQ ID NO: 414 - protein, 15 aa, Bordetella pertussis
EQVVITTDVLRLTFD

SEQ ID NO: 415 - protein, 15 aa, Bordetella pertussis
TTDVLRLTFDSNGAQ

SEQ ID NO: 416 - protein, 15 aa, Bordetella pertussis
RLTFDSNGAQLIRAE

SEQ ID NO: 417 - protein, 15 aa, Bordetella pertussis
SNGAQLIRAELLKYP

SEQ ID NO: 418 - protein, 15 aa, Bordetella pertussis
LIRAELLKYPSSSQS

SEQ ID NO: 419 - protein, 15 aa, Bordetella pertussis
LLKYPSSSQSDKPTV

SEQ ID NO: 420 - protein, 15 aa, Bordetella pertussis
SSSQSDKPTVLMDRS

SEQ ID NO: 421 - protein, 15 aa, Bordetella pertussis
DKPTVLMDRSADLVY

SEQ ID NO: 422 - protein, 15 aa, Bordetella pertussis
LMDRSADLVYVAQTG

SEQ ID NO: 423 - protein, 15 aa, Bordetella pertussis
ADLVYVAQTGVVGAP

SEQ ID NO: 424 - protein, 15 aa, Bordetella pertussis
VAQTGVVGAPQGESF

SEQ ID NO: 425 - protein, 15 aa, Bordetella pertussis
VVGAPQGESFPTHQT

SEQ ID NO: 426 - protein, 15 aa, Bordetella pertussis
QGESFPTHQTPFHLV

SEQ ID NO: 427 - protein, 15 aa, Bordetella pertussis
PTHQTPFHLVSSERS

SEQ ID NO: 428 - protein, 15 aa, Bordetella pertussis
PFHLVSSERSLTGDT

SEQ ID NO: 429 - protein, 15 aa, Bordetella pertussis
SSERSLTGDTLDVVF

SEQ ID NO: 430 - protein, 15 aa, Bordetella pertussis
LTGDTLDVVFEAESG

SEQ ID NO: 431 - protein, 15 aa, Bordetella pertussis
LDVVFEAESGGLKVT

SEQ ID NO: 432 - protein, 15 aa, Bordetella pertussis
EAESGGLKVTKTYTL

SEQ ID NO: 433 - protein, 15 aa, Bordetella pertussis
GLKVTKTYTLHRGRY

SEQ ID NO: 434 - protein, 15 aa, Bordetella pertussis
KTYTLHRGRYDVDVR

SEQ ID NO: 435 - protein, 15 aa, Bordetella pertussis
HRGRYDVDVRHAMAN

SEQ ID NO: 436 - protein, 15 aa, Bordetella pertussis
DVDVRHAMANTGGAP

SEQ ID NO: 437 - protein, 15 aa, Bordetella pertussis
HAMANTGGAPLNPAL

SEQ ID NO: 438 - protein, 15 aa, Bordetella pertussis
TGGAPLNPALYLQLE

SEQ ID NO: 439 - protein, 15 aa, Bordetella pertussis
LNPALYLQLERDGTD

SEQ ID NO: 440 - protein, 15 aa, Bordetella pertussis
YLQLERDGTDPAGTS

SEQ ID NO: 441 - protein, 15 aa, Bordetella pertussis
RDGTDPAGTSSFYHT

SEQ ID NO: 442 - protein, 15 aa, Bordetella pertussis
PAGTSSFYHTFTGVA

SEQ ID NO: 443 - protein, 15 aa, Bordetella pertussis
SFYHTFTGVAVYSEQ

SEQ ID NO: 444 - protein, 15 aa, Bordetella pertussis
FTGVAVYSEQDKFQK

SEQ ID NO: 445 - protein, 15 aa, Bordetella pertussis
VYSEQDKFQKVTFSD

SEQ ID NO: 446 - protein, 15 aa, Bordetella pertussis
DKFQKVTFSDIEKKK

SEQ ID NO: 447 - protein, 15 aa, Bordetella pertussis
VTFSDIEKKKGTYIK

SEQ ID NO: 448 - protein, 15 aa, Bordetella pertussis
IEKKKGTYIKQADNG

SEQ ID NO: 449 - protein, 15 aa, Bordetella pertussis
GTYIKQADNGWIGIV

SEQ ID NO: 450 - protein, 15 aa, Bordetella pertussis
QADNGWIGIVQHYFA

SEQ ID NO: 451 - protein, 15 aa, Bordetella pertussis
WIGIVQHYFATAWIP

SEQ ID NO: 452 - protein, 15 aa, Bordetella pertussis
QHYFATAWIPAQGKQ

SEQ ID NO: 453 - protein, 15 aa, Bordetella pertussis
TAWIPAQGKQRTNEL

SEQ ID NO: 454 - protein, 15 aa, Bordetella pertussis
AQGKQRTNELLQVQQ

SEQ ID NO: 455 - protein, 15 aa, Bordetella pertussis
RTNELLQVQQNLYAA

SEQ ID NO: 456 - protein, 15 aa, Bordetella pertussis
LQVQQNLYAARTIEA

SEQ ID NO: 457 - protein, 15 aa, Bordetella pertussis
NLYAARTIEAVGTIA

SEQ ID NO: 458 - protein, 15 aa, Bordetella pertussis
RTIEAVGTIAPGSSA

SEQ ID NO: 459 - protein, 15 aa, Bordetella pertussis
VGTIAPGSSANVDAH

SEQ ID NO: 460 - protein, 15 aa, Bordetella pertussis
PGSSANVDAHLWVGP

SEQ ID NO: 461 - protein, 15 aa, Bordetella pertussis
NVDAHLWVGPQDQKA

SEQ ID NO: 462 - protein, 15 aa, Bordetella pertussis
LWVGPQDQKAMAAVA

SEQ ID NO: 463 - protein, 15 aa, Bordetella pertussis
QDQKAMAAVAPGLEL

SEQ ID NO: 464 - protein, 15 aa, Bordetella pertussis
MAAVAPGLELVVDYG

SEQ ID NO: 465 - protein, 15 aa, Bordetella pertussis
PGLELVVDYGWLTII

SEQ ID NO: 466 - protein, 15 aa, Bordetella pertussis
VVDYGWLTIIAKPLF

SEQ ID NO: 467 - protein, 15 aa, Bordetella pertussis
WLTIIAKPLFTLMTW

SEQ ID NO: 468 - protein, 15 aa, Bordetella pertussis
AKPLFTLMTWLHGLL

SEQ ID NO: 469 - protein, 15 aa, Bordetella pertussis
TLMTWLHGLLGNWGW

SEQ ID NO: 470 - protein, 15 aa, Bordetella pertussis
LHGLLGNWGWTIVAL

SEQ ID NO: 471 - protein, 15 aa, Bordetella pertussis
GNWGWTIVALTVIIK

SEQ ID NO: 472 - protein, 15 aa, Bordetella pertussis
TIVALTVIIKAVFFP

SEQ ID NO: 473 - protein, 15 aa, Bordetella pertussis
TVIIKAVFFPLAAAS

SEQ ID NO: 474 - protein, 15 aa, Bordetella pertussis
AVFFPLAAASYRSMA

SEQ ID NO: 475 - protein, 15 aa, Bordetella pertussis
LAAASYRSMARMKQV

SEQ ID NO: 476 - protein, 15 aa, Bordetella pertussis
YRSMARMKQVAPRLQ

SEQ ID NO: 477 - protein, 15 aa, Bordetella pertussis
RMKQVAPRLQALKEK

SEQ ID NO: 478 - protein, 15 aa, Bordetella pertussis
APRLQALKEKYGDDR

SEQ ID NO: 479 - protein, 15 aa, Bordetella pertussis
ALKEKYGDDRQKLNQ

SEQ ID NO: 480 - protein, 15 aa, Bordetella pertussis
YGDDRQKLNQAMMEM

SEQ ID NO: 481 - protein, 15 aa, Bordetella pertussis
QKLNQAMMEMYRTEK

SEQ ID NO: 482 - protein, 15 aa, Bordetella pertussis
AMMEMYRTEKINPLG

SEQ ID NO: 483 - protein, 15 aa, Bordetella pertussis
YRTEKINPLGGCLPM

SEQ ID NO: 484 - protein, 15 aa, Bordetella pertussis
INPLGGCLPMVVQIP

SEQ ID NO: 485 - protein, 15 aa, Bordetella pertussis
GCLPMVVQIPVFIAL

SEQ ID NO: 486 - protein, 15 aa, Bordetella pertussis
VVQIPVFIALYWVLL

SEQ ID NO: 487 - protein, 15 aa, Bordetella pertussis
VFIALYWVLLASVEM

SEQ ID NO: 488 - protein, 15 aa, Bordetella pertussis
YWVLLASVEMRGAPW

SEQ ID NO: 489 - protein, 15 aa, Bordetella pertussis
ASVEMRGAPWILWVH

SEQ ID NO: 490 - protein, 15 aa, Bordetella pertussis
RGAPWILWVHDLSVR

SEQ ID NO: 491 - protein, 15 aa, Bordetella pertussis
ILWVHDLSVRDPFFI

SEQ ID NO: 492 - protein, 15 aa, Bordetella pertussis
DLSVRDPFFILPAIM

SEQ ID NO: 493 - protein, 15 aa, Bordetella pertussis
DPFFILPAIMMATMF

SEQ ID NO: 494 - protein, 15 aa, Bordetella pertussis
LPAIMMATMFLQIKL

SEQ ID NO: 495 - protein, 15 aa, Bordetella pertussis
MATMFLQIKLNPTPP

SEQ ID NO: 496 - protein, 15 aa, Bordetella pertussis
LQIKLNPTPPDPVQA

SEQ ID NO: 497 - protein, 15 aa, Bordetella pertussis
NPTPPDPVQAKVMMI

SEQ ID NO: 498 - protein, 15 aa, Bordetella pertussis
DPVQAKVMMIMPLVF

SEQ ID NO: 499 - protein, 15 aa, Bordetella pertussis
KVMMIMPLVFGGMMF

SEQ ID NO: 500 - protein, 15 aa, Bordetella pertussis
MPLVFGGMMFFFPAG

SEQ ID NO: 501 - protein, 15 aa, Bordetella pertussis
GGMMFFFPAGLVLYW

SEQ ID NO: 502 - protein, 15 aa, Bordetella pertussis
FFPAGLVLYWCVNNT

SEQ ID NO: 503 - protein, 15 aa, Bordetella pertussis
LVLYWCVNNTLSIAQ

SEQ ID NO: 504 - protein, 15 aa, Bordetella pertussis
CVNNTLSIAQQWTIT

SEQ ID NO: 505 - protein, 15 aa, Bordetella pertussis
LSIAQQWTITRNLER

SEQ ID NO: 506 - protein, 15 aa, Bordetella pertussis
QWTITRNLERQAAAA

SEQ ID NO: 507 - protein, 15 aa, Bordetella pertussis
ITRNLERQAAAAANR

SEQ ID NO: 508 - protein, 15 aa, Bordetella pertussis
MPATHPAPDPLWYKD

SEQ ID NO: 509 - protein, 15 aa, Bordetella pertussis
PAPDPLWYKDAVIYQ

SEQ ID NO: 510 - protein, 15 aa, Bordetella pertussis
LWYKDAVIYQLHVKS

SEQ ID NO: 511 - protein, 15 aa, Bordetella pertussis
AVIYQLHVKSFFDAN

SEQ ID NO: 512 - protein, 15 aa, Bordetella pertussis
LHVKSFFDANDDGVG

SEQ ID NO: 513 - protein, 15 aa, Bordetella pertussis
FFDANDDGVGDFAGL

SEQ ID NO: 514 - protein, 15 aa, Bordetella pertussis
DDGVGDFAGLLAKLD

SEQ ID NO: 515 - protein, 15 aa, Bordetella pertussis
DFAGLLAKLDYIVEL

SEQ ID NO: 516 - protein, 15 aa, Bordetella pertussis
LAKLDYIVELGVNTI

SEQ ID NO: 517 - protein, 15 aa, Bordetella pertussis
YIVELGVNTIWLLPF

SEQ ID NO: 518 - protein, 15 aa, Bordetella pertussis
GVNTIWLLPFYPSPR

SEQ ID NO: 519 - protein, 15 aa, Bordetella pertussis
WLLPFYPSPRRDDGY

SEQ ID NO: 520 - protein, 15 aa, Bordetella pertussis
YPSPRRDDGYDIADY

SEQ ID NO: 521 - protein, 15 aa, Bordetella pertussis
RDDGYDIADYRGVHP

SEQ ID NO: 522 - protein, 15 aa, Bordetella pertussis
DIADYRGVHPDYGSL

SEQ ID NO: 523 - protein, 15 aa, Bordetella pertussis
RGVHPDYGSLADARL

SEQ ID NO: 524 - protein, 15 aa, Bordetella pertussis
DYGSLADARLLVRAA

SEQ ID NO: 525 - protein, 15 aa, Bordetella pertussis
ADARLLVRAAHARGL

SEQ ID NO: 526 - protein, 15 aa, Bordetella pertussis
LVRAAHARGLRVITE

SEQ ID NO: 527 - protein, 15 aa, Bordetella pertussis
HARGLRVITELVINH

SEQ ID NO: 528 - protein, 15 aa, Bordetella pertussis
RVITELVINHTSDQH

SEQ ID NO: 529 - protein, 15 aa, Bordetella pertussis
LVINHTSDQHPWFQR

SEQ ID NO: 530 - protein, 15 aa, Bordetella pertussis
TSDQHPWFQRARAAR

SEQ ID NO: 531 - protein, 15 aa, Bordetella pertussis
PWFQRARAARPGSAH

SEQ ID NO: 532 - protein, 15 aa, Bordetella pertussis
ARAARPGSAHRAYYV

SEQ ID NO: 533 - protein, 15 aa, Bordetella pertussis
PGSAHRAYYVWSDDD

SEQ ID NO: 534 - protein, 15 aa, Bordetella pertussis
RAYYVWSDDDKAYAG

SEQ ID NO: 535 - protein, 15 aa, Bordetella pertussis
WSDDDKAYAGTRIIF

SEQ ID NO: 536 - protein, 15 aa, Bordetella pertussis
KAYAGTRIIFCDTEK

SEQ ID NO: 537 - protein, 15 aa, Bordetella pertussis
TRIIFCDTEKSNWTW

SEQ ID NO: 538 - protein, 15 aa, Bordetella pertussis
CDTEKSNWTWDPVAG

SEQ ID NO: 539 - protein, 15 aa, Bordetella pertussis
SNWTWDPVAGAYFWH

SEQ ID NO: 540 - protein, 15 aa, Bordetella pertussis
DPVAGAYFWHRFYSH

SEQ ID NO: 541 - protein, 15 aa, Bordetella pertussis
AYFWHRFYSHQPDLN

SEQ ID NO: 542 - protein, 15 aa, Bordetella pertussis
RFYSHQPDLNYDNPQ

SEQ ID NO: 543 - protein, 15 aa, Bordetella pertussis
QPDLNYDNPQVLREV

SEQ ID NO: 544 - protein, 15 aa, Bordetella pertussis
YDNPQVLREVLGAMR

SEQ ID NO: 545 - protein, 15 aa, Bordetella pertussis
VLREVLGAMRYWLDM

SEQ ID NO: 546 - protein, 15 aa, Bordetella pertussis
LGAMRYWLDMGVDGL

SEQ ID NO: 547 - protein, 15 aa, Bordetella pertussis
YWLDMGVDGLRLDAV

SEQ ID NO: 548 - protein, 15 aa, Bordetella pertussis
GVDGLRLDAVPYLVE

SEQ ID NO: 549 - protein, 15 aa, Bordetella pertussis
RLDAVPYLVEREGTN

SEQ ID NO: 550 - protein, 15 aa, Bordetella pertussis
PYLVEREGTNNENLP

SEQ ID NO: 551 - protein, 15 aa, Bordetella pertussis
REGTNNENLPETHAI

SEQ ID NO: 552 - protein, 15 aa, Bordetella pertussis
NENLPETHAILRRIR

SEQ ID NO: 553 - protein, 15 aa, Bordetella pertussis
ETHAILRRIRRVIDS

SEQ ID NO: 554 - protein, 15 aa, Bordetella pertussis
LRRIRRVIDSEYPGR

SEQ ID NO: 555 - protein, 15 aa, Bordetella pertussis
RVIDSEYPGRMLLAE

SEQ ID NO: 556 - protein, 15 aa, Bordetella pertussis
EYPGRMLLAEANQWP

SEQ ID NO: 557 - protein, 15 aa, Bordetella pertussis
MLLAEANQWPEDAQE

SEQ ID NO: 558 - protein, 15 aa, Bordetella pertussis
ANQWPEDAQEYFGAG

SEQ ID NO: 559 - protein, 15 aa, Bordetella pertussis
EDAQEYFGAGDECHM

SEQ ID NO: 560 - protein, 15 aa, Bordetella pertussis
YFGAGDECHMAFHFP

SEQ ID NO: 561 - protein, 15 aa, Bordetella pertussis
DECHMAFHFPLMPRM

SEQ ID NO: 562 - protein, 15 aa, Bordetella pertussis
AFHFPLMPRMYMAIA

SEQ ID NO: 563 - protein, 15 aa, Bordetella pertussis
LMPRMYMAIAQEDRL

SEQ ID NO: 564 - protein, 15 aa, Bordetella pertussis
YMAIAQEDRLPVTDI

SEQ ID NO: 565 - protein, 15 aa, Bordetella pertussis
QEDRLPVTDIIRQTP

SEQ ID NO: 566 - protein, 15 aa, Bordetella pertussis
PVTDIIRQTPSIAPQ

SEQ ID NO: 567 - protein, 15 aa, Bordetella pertussis
IRQTPSIAPQCQWAI

SEQ ID NO: 568 - protein, 15 aa, Bordetella pertussis
SIAPQCQWAIFLRNH

SEQ ID NO: 569 - protein, 15 aa, Bordetella pertussis
CQWAIFLRNHDELTL

SEQ ID NO: 570 - protein, 15 aa, Bordetella pertussis
FLRNHDELTLEMVTS

SEQ ID NO: 571 - protein, 15 aa, Bordetella pertussis
DELTLEMVTSRERDY

SEQ ID NO: 572 - protein, 15 aa, Bordetella pertussis
EMVTSRERDYLWNVY

SEQ ID NO: 573 - protein, 15 aa, Bordetella pertussis
RERDYLWNVYAAEPR

SEQ ID NO: 574 - protein, 15 aa, Bordetella pertussis
LWNVYAAEPRARINL

SEQ ID NO: 575 - protein, 15 aa, Bordetella pertussis
AAEPRARINLGIRRR

SEQ ID NO: 576 - protein, 15 aa, Bordetella pertussis
ARINLGIRRRLAPLL

SEQ ID NO: 577 - protein, 15 aa, Bordetella pertussis
GIRRRLAPLLERDRR

SEQ ID NO: 578 - protein, 15 aa, Bordetella pertussis
LAPLLERDRRRIELM

SEQ ID NO: 579 - protein, 15 aa, Bordetella pertussis
ERDRRRIELMNSLLL

SEQ ID NO: 580 - protein, 15 aa, Bordetella pertussis
RIELMNSLLLSMPGT

SEQ ID NO: 581 - protein, 15 aa, Bordetella pertussis
NSLLLSMPGTPVLYY

SEQ ID NO: 582 - protein, 15 aa, Bordetella pertussis
SMPGTPVLYYGDELG

SEQ ID NO: 583 - protein, 15 aa, Bordetella pertussis
PVLYYGDELGMGDNI

SEQ ID NO: 584 - protein, 15 aa, Bordetella pertussis
GDELGMGDNIHLGDR

SEQ ID NO: 585 - protein, 15 aa, Bordetella pertussis
MGDNIHLGDRDGVRT

SEQ ID NO: 586 - protein, 15 aa, Bordetella pertussis
HLGDRDGVRTPMQWS

SEQ ID NO: 587 - protein, 15 aa, Bordetella pertussis
DGVRTPMQWSPDRNG

SEQ ID NO: 588 - protein, 15 aa, Bordetella pertussis
PMQWSPDRNGGFSRA

SEQ ID NO: 589 - protein, 15 aa, Bordetella pertussis
PDRNGGFSRADPERL

SEQ ID NO: 590 - protein, 15 aa, Bordetella pertussis
GFSRADPERLPLPLL

SEQ ID NO: 591 - protein, 15 aa, Bordetella pertussis
DPERLPLPLLMGPLY

SEQ ID NO: 592 - protein, 15 aa, Bordetella pertussis
PLPLLMGPLYGYEAV

SEQ ID NO: 593 - protein, 15 aa, Bordetella pertussis
MGPLYGYEAVNVEAQ

SEQ ID NO: 594 - protein, 15 aa, Bordetella pertussis
GYEAVNVEAQQRDPH

SEQ ID NO: 595 - protein, 15 aa, Bordetella pertussis
NVEAQQRDPHSLLNW

SEQ ID NO: 596 - protein, 15 aa, Bordetella pertussis
QRDPHSLLNWTRRML

SEQ ID NO: 597 - protein, 15 aa, Bordetella pertussis
SLLNWTRRMLAKRRQ

SEQ ID NO: 598 - protein, 15 aa, Bordetella pertussis
TRRMLAKRRQSHVFG

SEQ ID NO: 599 - protein, 15 aa, Bordetella pertussis
AKRRQSHVFGRGELS

SEQ ID NO: 600 - protein, 15 aa, Bordetella pertussis
SHVFGRGELSFLYPG

SEQ ID NO: 601 - protein, 15 aa, Bordetella pertussis
RGELSFLYPGNRKIL

SEQ ID NO: 602 - protein, 15 aa, Bordetella pertussis
FLYPGNRKILAYLRT

SEQ ID NO: 603 - protein, 15 aa, Bordetella pertussis
NRKILAYLRTWEDTV

SEQ ID NO: 604 - protein, 15 aa, Bordetella pertussis
AYLRTWEDTVVLCVA

SEQ ID NO: 605 - protein, 15 aa, Bordetella pertussis
WEDTVVLCVANLSQA

SEQ ID NO: 606 - protein, 15 aa, Bordetella pertussis
VLCVANLSQAAQPVE

SEQ ID NO: 607 - protein, 15 aa, Bordetella pertussis
NLSQAAQPVELHLSE

SEQ ID NO: 608 - protein, 15 aa, Bordetella pertussis
AQPVELHLSEYAGRV

SEQ ID NO: 609 - protein, 15 aa, Bordetella pertussis
LHLSEYAGRVPVEML

SEQ ID NO: 610 - protein, 15 aa, Bordetella pertussis
YAGRVPVEMLGGTAF

SEQ ID NO: 611 - protein, 15 aa, Bordetella pertussis
PVEMLGGTAFPQIGE

SEQ ID NO: 612 - protein, 15 aa, Bordetella pertussis
GGTAFPQIGELPYLL

SEQ ID NO: 613 - protein, 15 aa, Bordetella pertussis
PQIGELPYLLTLPPF

SEQ ID NO: 614 - protein, 15 aa, Bordetella pertussis
LPYLLTLPPFGFYWL

SEQ ID NO: 615 - protein, 15 aa, Bordetella pertussis
TLPPFGFYWLDLSAG

SEQ ID NO: 616 - protein, 15 aa, Bordetella pertussis
GFYWLDLSAGAAPPA

SEQ ID NO: 617 - protein, 15 aa, Bordetella pertussis
DLSAGAAPPAWHSEL

SEQ ID NO: 618 - protein, 15 aa, Bordetella pertussis
AAPPAWHSELPPQMP

SEQ ID NO: 619 - protein, 15 aa, Bordetella pertussis
WHSELPPQMPESITL

SEQ ID NO: 620 - protein, 15 aa, Bordetella pertussis
PPQMPESITLVSRGA

SEQ ID NO: 621 - protein, 15 aa, Bordetella pertussis
ESITLVSRGAGAALR

SEQ ID NO: 622 - protein, 15 aa, Bordetella pertussis
VSRGAGAALRLTEAS

SEQ ID NO: 623 - protein, 15 aa, Bordetella pertussis
GAALRLTEASRRQLE

SEQ ID NO: 624 - protein, 15 aa, Bordetella pertussis
LTEASRRQLEADVLP

SEQ ID NO: 625 - protein, 15 aa, Bordetella pertussis
RRQLEADVLPAYLQR

SEQ ID NO: 626 - protein, 15 aa, Bordetella pertussis
ADVLPAYLQRQRWYA

SEQ ID NO: 627 - protein, 15 aa, Bordetella pertussis
AYLQRQRWYAARRKP

SEQ ID NO: 628 - protein, 15 aa, Bordetella pertussis
QRWYAARRKPGVMRL

SEQ ID NO: 629 - protein, 15 aa, Bordetella pertussis
ARRKPGVMRLAYSVP

SEQ ID NO: 630 - protein, 15 aa, Bordetella pertussis
GVMRLAYSVPLNDDV

SEQ ID NO: 631 - protein, 15 aa, Bordetella pertussis
AYSVPLNDDVESYYE

SEQ ID NO: 632 - protein, 15 aa, Bordetella pertussis
LNDDVESYYEAEIEV

SEQ ID NO: 633 - protein, 15 aa, Bordetella pertussis
ESYYEAEIEVSDDGP

SEQ ID NO: 634 - protein, 15 aa, Bordetella pertussis
AEIEVSDDGPPRRFH

SEQ ID NO: 635 - protein, 15 aa, Bordetella pertussis
SDDGPPRRFHTPVAL

SEQ ID NO: 636 - protein, 15 aa, Bordetella pertussis
PRRFHTPVALAWQDD

SEQ ID NO: 637 - protein, 15 aa, Bordetella pertussis
TPVALAWQDDTAAQY

SEQ ID NO: 638 - protein, 15 aa, Bordetella pertussis
AWQDDTAAQYPLARV

SEQ ID NO: 639 - protein, 15 aa, Bordetella pertussis
TAAQYPLARVRRGAQ

SEQ ID NO: 640 - protein, 15 aa, Bordetella pertussis
PLARVRRGAQLGTLT

SEQ ID NO: 641 - protein, 15 aa, Bordetella pertussis
RRGAQLGTLTDASLQ

SEQ ID NO: 642 - protein, 15 aa, Bordetella pertussis
LGTLTDASLQPGYAR

SEQ ID NO: 643 - protein, 15 aa, Bordetella pertussis
DASLQPGYARVLLAA

SEQ ID NO: 644 - protein, 15 aa, Bordetella pertussis
PGYARVLLAALTAGR

SEQ ID NO: 645 - protein, 15 aa, Bordetella pertussis
VLLAALTAGRDIQAG

SEQ ID NO: 646 - protein, 15 aa, Bordetella pertussis
LTAGRDIQAGGEPAV

SEQ ID NO: 647 - protein, 15 aa, Bordetella pertussis
DIQAGGEPAVRLRFL

SEQ ID NO: 648 - protein, 15 aa, Bordetella pertussis
GEPAVRLRFLPEPGL

SEQ ID NO: 649 - protein, 15 aa, Bordetella pertussis
RLRFLPEPGLADLAL

SEQ ID NO: 650 - protein, 15 aa, Bordetella pertussis
PEPGLADLALRDDSE

SEQ ID NO: 651 - protein, 15 aa, Bordetella pertussis
ADLALRDDSEVRALS

SEQ ID NO: 652 - protein, 15 aa, Bordetella pertussis
RDDSEVRALSADQSN

SEQ ID NO: 653 - protein, 15 aa, Bordetella pertussis
VRALSADQSNSSLLV

SEQ ID NO: 654 - protein, 15 aa, Bordetella pertussis
ADQSNSSLLVGERVV

SEQ ID NO: 655 - protein, 15 aa, Bordetella pertussis
SSLLVGERVVFKLLR

SEQ ID NO: 656 - protein, 15 aa, Bordetella pertussis
GERVVFKLLRELHAG

SEQ ID NO: 657 - protein, 15 aa, Bordetella pertussis
FKLLRELHAGPHPEA

SEQ ID NO: 658 - protein, 15 aa, Bordetella pertussis
ELHAGPHPEAEMTRY

SEQ ID NO: 659 - protein, 15 aa, Bordetella pertussis
PHPEAEMTRYLTQAG

SEQ ID NO: 660 - protein, 15 aa, Bordetella pertussis
EMTRYLTQAGYAHTP

SEQ ID NO: 661 - protein, 15 aa, Bordetella pertussis
LTQAGYAHTPALLGE

SEQ ID NO: 662 - protein, 15 aa, Bordetella pertussis
YAHTPALLGEVVRVQ

SEQ ID NO: 663 - protein, 15 aa, Bordetella pertussis
ALLGEVVRVQGDQAP

SEQ ID NO: 664 - protein, 15 aa, Bordetella pertussis
VVRVQGDQAPHTLAL

SEQ ID NO: 665 - protein, 15 aa, Bordetella pertussis
GDQAPHTLALAHAYV

SEQ ID NO: 666 - protein, 15 aa, Bordetella pertussis
HTLALAHAYVVNEGD

SEQ ID NO: 667 - protein, 15 aa, Bordetella pertussis
AHAYVVNEGDAWNWT

SEQ ID NO: 668 - protein, 15 aa, Bordetella pertussis
VNEGDAWNWTVAYLK

SEQ ID NO: 669 - protein, 15 aa, Bordetella pertussis
AWNWTVAYLKRTLDA

SEQ ID NO: 670 - protein, 15 aa, Bordetella pertussis
VAYLKRTLDAAILTG

SEQ ID NO: 671 - protein, 15 aa, Bordetella pertussis
RTLDAAILTGASADD

SEQ ID NO: 672 - protein, 15 aa, Bordetella pertussis
AILTGASADDYQQEL

SEQ ID NO: 673 - protein, 15 aa, Bordetella pertussis
ASADDYQQELAGYEV

SEQ ID NO: 674 - protein, 15 aa, Bordetella pertussis
YQQELAGYEVLAGTI

SEQ ID NO: 675 - protein, 15 aa, Bordetella pertussis
AGYEVLAGTIGQRLA

SEQ ID NO: 676 - protein, 15 aa, Bordetella pertussis
LAGTIGQRLAQMHSV

SEQ ID NO: 677 - protein, 15 aa, Bordetella pertussis
GQRLAQMHSVLARAG

SEQ ID NO: 678 - protein, 15 aa, Bordetella pertussis
QMHSVLARAGELPGF

SEQ ID NO: 679 - protein, 15 aa, Bordetella pertussis
LARAGELPGFAPRPA

SEQ ID NO: 680 - protein, 15 aa, Bordetella pertussis
ELPGFAPRPASERDA

SEQ ID NO: 681 - protein, 15 aa, Bordetella pertussis
APRPASERDAALAGE

SEQ ID NO: 682 - protein, 15 aa, Bordetella pertussis
SERDAALAGERAVAQ

SEQ ID NO: 683 - protein, 15 aa, Bordetella pertussis
ALAGERAVAQLDRAL

SEQ ID NO: 684 - protein, 15 aa, Bordetella pertussis
RAVAQLDRALQALRA

SEQ ID NO: 685 - protein, 15 aa, Bordetella pertussis
LDRALQALRACESGL

SEQ ID NO: 686 - protein, 15 aa, Bordetella pertussis
QALRACESGLAPASH

SEQ ID NO: 687 - protein, 15 aa, Bordetella pertussis
CESGLAPASHACAQW

SEQ ID NO: 688 - protein, 15 aa, Bordetella pertussis
APASHACAQWLFEHR

SEQ ID NO: 689 - protein, 15 aa, Bordetella pertussis
ACAQWLFEHRDRLAA

SEQ ID NO: 690 - protein, 15 aa, Bordetella pertussis
LFEHRDRLAAHIMTL

SEQ ID NO: 691 - protein, 15 aa, Bordetella pertussis
DRLAAHIMTLAQAET

SEQ ID NO: 692 - protein, 15 aa, Bordetella pertussis
HIMTLAQAETGALRI

SEQ ID NO: 693 - protein, 15 aa, Bordetella pertussis
AQAETGALRIRVHGD

SEQ ID NO: 694 - protein, 15 aa, Bordetella pertussis
GALRIRVHGDFHLGQ

SEQ ID NO: 695 - protein, 15 aa, Bordetella pertussis
RVHGDFHLGQILVAQ

SEQ ID NO: 696 - protein, 15 aa, Bordetella pertussis
FHLGQILVAQTDAYL

SEQ ID NO: 697 - protein, 15 aa, Bordetella pertussis
ILVAQTDAYLIDFEG

SEQ ID NO: 698 - protein, 15 aa, Bordetella pertussis
TDAYLIDFEGEPARP

SEQ ID NO: 699 - protein, 15 aa, Bordetella pertussis
IDFEGEPARPMAERR

SEQ ID NO: 700 - protein, 15 aa, Bordetella pertussis
EPARPMAERRQLSSP

SEQ ID NO: 701 - protein, 15 aa, Bordetella pertussis
MAERRQLSSPFKDVA

SEQ ID NO: 702 - protein, 15 aa, Bordetella pertussis
QLSSPFKDVAGILRS

SEQ ID NO: 703 - protein, 15 aa, Bordetella pertussis
FKDVAGILRSFDYAV

SEQ ID NO: 704 - protein, 15 aa, Bordetella pertussis
GILRSFDYAVAELSR

SEQ ID NO: 705 - protein, 15 aa, Bordetella pertussis
FDYAVAELSRDDPLG

SEQ ID NO: 706 - protein, 15 aa, Bordetella pertussis
AELSRDDPLGGAPRD

SEQ ID NO: 707 - protein, 15 aa, Bordetella pertussis
DDPLGGAPRDFNTGV

SEQ ID NO: 708 - protein, 15 aa, Bordetella pertussis
GAPRDFNTGVAEPAD

SEQ ID NO: 709 - protein, 15 aa, Bordetella pertussis
FNTGVAEPADPASAP

SEQ ID NO: 710 - protein, 15 aa, Bordetella pertussis
AEPADPASAPRETRE

SEQ ID NO: 711 - protein, 15 aa, Bordetella pertussis
PASAPRETREALLAR

SEQ ID NO: 712 - protein, 15 aa, Bordetella pertussis
RETREALLARFRQRA

SEQ ID NO: 713 - protein, 15 aa, Bordetella pertussis
ALLARFRQRAGAALL

SEQ ID NO: 714 - protein, 15 aa, Bordetella pertussis
FRQRAGAALLASYGN

SEQ ID NO: 715 - protein, 15 aa, Bordetella pertussis
GAALLASYGNAIDPV

SEQ ID NO: 716 - protein, 15 aa, Bordetella pertussis
ASYGNAIDPVLALPP

SEQ ID NO: 717 - protein, 15 aa, Bordetella pertussis
AIDPVLALPPERAQA

SEQ ID NO: 718 - protein, 15 aa, Bordetella pertussis
LALPPERAQALTCLY

SEQ ID NO: 719 - protein, 15 aa, Bordetella pertussis
ERAQALTCLYLLEKA

SEQ ID NO: 720 - protein, 15 aa, Bordetella pertussis
LTCLYLLEKAAYEIC

SEQ ID NO: 721 - protein, 15 aa, Bordetella pertussis
LLEKAAYEICYESAY

SEQ ID NO: 722 - protein, 15 aa, Bordetella pertussis
AYEICYESAYRPERL

SEQ ID NO: 723 - protein, 15 aa, Bordetella pertussis
YESAYRPERLPVPIH

SEQ ID NO: 724 - protein, 15 aa, Bordetella pertussis
RPERLPVPIHGLAET

SEQ ID NO: 725 - protein, 15 aa, Bordetella pertussis
PVPIHGLAETARAAL

SEQ ID NO: 726 - protein, 15 aa, Bordetella pertussis
GLAETARAALLAAAV

SEQ ID NO: 727 - protein, 15 aa, Bordetella pertussis
ARAALLAAAVDHDEG

SEQ ID NO: 728 - protein, 15 aa, Bordetella pertussis
ALLAAAVDHDEGPAP

SEQ ID NO: 729 - protein, 15 aa, Bordetella pertussis
MPAPHRLYPRSLICL

SEQ ID NO: 730 - protein, 15 aa, Bordetella pertussis
RLYPRSLICLAQALL

SEQ ID NO: 731 - protein, 15 aa, Bordetella pertussis
SLICLAQALLAWALL

SEQ ID NO: 732 - protein, 15 aa, Bordetella pertussis
AQALLAWALLAWAPA

SEQ ID NO: 733 - protein, 15 aa, Bordetella pertussis
AWALLAWAPAQASQE

SEQ ID NO: 734 - protein, 15 aa, Bordetella pertussis
AWAPAQASQELTLVG

SEQ ID NO: 735 - protein, 15 aa, Bordetella pertussis
QASQELTLVGKAAVP

SEQ ID NO: 736 - protein, 15 aa, Bordetella pertussis
LTLVGKAAVPDVEVA

SEQ ID NO: 737 - protein, 15 aa, Bordetella pertussis
KAAVPDVEVALDGDD

SEQ ID NO: 738 - protein, 15 aa, Bordetella pertussis
DVEVALDGDDWRWLA

SEQ ID NO: 739 - protein, 15 aa, Bordetella pertussis
LDGDDWRWLARKRVL

SEQ ID NO: 740 - protein, 15 aa, Bordetella pertussis
WRWLARKRVLTLGVY

SEQ ID NO: 741 - protein, 15 aa, Bordetella pertussis
RKRVLTLGVYAPDIP

SEQ ID NO: 742 - protein, 15 aa, Bordetella pertussis
TLGVYAPDIPPFDVT

SEQ ID NO: 743 - protein, 15 aa, Bordetella pertussis
APDIPPFDVTYGERY

SEQ ID NO: 744 - protein, 15 aa, Bordetella pertussis
PFDVTYGERYEGLTA

SEQ ID NO: 745 - protein, 15 aa, Bordetella pertussis
YGERYEGLTADYMAI

SEQ ID NO: 746 - protein, 15 aa, Bordetella pertussis
EGLTADYMAIIAHNL

SEQ ID NO: 747 - protein, 15 aa, Bordetella pertussis
DYMAIIAHNLGMQAK

SEQ ID NO: 748 - protein, 15 aa, Bordetella pertussis
IAHNLGMQAKVLRYP

SEQ ID NO: 749 - protein, 15 aa, Bordetella pertussis
GMQAKVLRYPTREQA

SEQ ID NO: 750 - protein, 15 aa, Bordetella pertussis
VLRYPTREQALSALE

SEQ ID NO: 751 - protein, 15 aa, Bordetella pertussis
TREQALSALESGQID

SEQ ID NO: 752 - protein, 15 aa, Bordetella pertussis
LSALESGQIDLIGTV

SEQ ID NO: 753 - protein, 15 aa, Bordetella pertussis
SGQIDLIGTVNGTDG

SEQ ID NO: 754 - protein, 15 aa, Bordetella pertussis
LIGTVNGTDGRQQSL

SEQ ID NO: 755 - protein, 15 aa, Bordetella pertussis
NGTDGRQQSLRLSVP

SEQ ID NO: 756 - protein, 15 aa, Bordetella pertussis
RQQSLRLSVPYAADH

SEQ ID NO: 757 - protein, 15 aa, Bordetella pertussis
RLSVPYAADHPVIVM

SEQ ID NO: 758 - protein, 15 aa, Bordetella pertussis
YAADHPVIVMPIGAR

SEQ ID NO: 759 - protein, 15 aa, Bordetella pertussis
PVIVMPIGARHVPAS

SEQ ID NO: 760 - protein, 15 aa, Bordetella pertussis
PIGARHVPASNLAGQ

SEQ ID NO: 761 - protein, 15 aa, Bordetella pertussis
HVPASNLAGQRLAVD

SEQ ID NO: 762 - protein, 15 aa, Bordetella pertussis
NLAGQRLAVDINYLP

SEQ ID NO: 763 - protein, 15 aa, Bordetella pertussis
RLAVDINYLPKETLA

SEQ ID NO: 764 - protein, 15 aa, Bordetella pertussis
INYLPKETLARAYPQ

SEQ ID NO: 765 - protein, 15 aa, Bordetella pertussis
KETLARAYPQATLHY

SEQ ID NO: 766 - protein, 15 aa, Bordetella pertussis
RAYPQATLHYFPSSE

SEQ ID NO: 767 - protein, 15 aa, Bordetella pertussis
ATLHYFPSSEQALAA

SEQ ID NO: 768 - protein, 15 aa, Bordetella pertussis
FPSSEQALAAVAYGQ

SEQ ID NO: 769 - protein, 15 aa, Bordetella pertussis
QALAAVAYGQADVFI

SEQ ID NO: 770 - protein, 15 aa, Bordetella pertussis
VAYGQADVFIGDALT

SEQ ID NO: 771 - protein, 15 aa, Bordetella pertussis
ADVFIGDALTTSHLV

SEQ ID NO: 772 - protein, 15 aa, Bordetella pertussis
GDALTTSHLVSQSYF

SEQ ID NO: 773 - protein, 15 aa, Bordetella pertussis
TSHLVSQSYFNDVRV

SEQ ID NO: 774 - protein, 15 aa, Bordetella pertussis
SQSYFNDVRVVAPAH

SEQ ID NO: 775 - protein, 15 aa, Bordetella pertussis
NDVRVVAPAHIATGG

SEQ ID NO: 776 - protein, 15 aa, Bordetella pertussis
VAPAHIATGGESFGV

SEQ ID NO: 777 - protein, 15 aa, Bordetella pertussis
IATGGESFGVRADNT

SEQ ID NO: 778 - protein, 15 aa, Bordetella pertussis
ESFGVRADNTRLLRV

SEQ ID NO: 779 - protein, 15 aa, Bordetella pertussis
RADNTRLLRVVNAVL

SEQ ID NO: 780 - protein, 15 aa, Bordetella pertussis
RLLRVVNAVLEAIPP

SEQ ID NO: 781 - protein, 15 aa, Bordetella pertussis
VNAVLEAIPPSEHRS

SEQ ID NO: 782 - protein, 15 aa, Bordetella pertussis
EAIPPSEHRSLIYRW

SEQ ID NO: 783 - protein, 15 aa, Bordetella pertussis
SEHRSLIYRWGLGSS

SEQ ID NO: 784 - protein, 15 aa, Bordetella pertussis
LIYRWGLGSSISLDF

SEQ ID NO: 785 - protein, 15 aa, Bordetella pertussis
GLGSSISLDFAHPAY

SEQ ID NO: 786 - protein, 15 aa, Bordetella pertussis
ISLDFAHPAYSAREQ

SEQ ID NO: 787 - protein, 15 aa, Bordetella pertussis
AHPAYSAREQQWMAD

SEQ ID NO: 788 - protein, 15 aa, Bordetella pertussis
SAREQQWMADHPVVK

SEQ ID NO: 789 - protein, 15 aa, Bordetella pertussis
QWMADHPVVKVAVLN

SEQ ID NO: 790 - protein, 15 aa, Bordetella pertussis
HPVVKVAVLNLFAPF

SEQ ID NO: 791 - protein, 15 aa, Bordetella pertussis
VAVLNLFAPFTLFRT

SEQ ID NO: 792 - protein, 15 aa, Bordetella pertussis
LFAPFTLFRTDEQFG

SEQ ID NO: 793 - protein, 15 aa, Bordetella pertussis
TLFRTDEQFGGISAA

SEQ ID NO: 794 - protein, 15 aa, Bordetella pertussis
DEQFGGISAAVLQLL

SEQ ID NO: 795 - protein, 15 aa, Bordetella pertussis
GISAAVLQLLQLRTG

SEQ ID NO: 796 - protein, 15 aa, Bordetella pertussis
VLQLLQLRTGLDFEI

SEQ ID NO: 797 - protein, 15 aa, Bordetella pertussis
QLRTGLDFEIIGVDT

SEQ ID NO: 798 - protein, 15 aa, Bordetella pertussis
LDFEIIGVDTVEELI

SEQ ID NO: 799 - protein, 15 aa, Bordetella pertussis
IGVDTVEELIAKLRS

SEQ ID NO: 800 - protein, 15 aa, Bordetella pertussis
VEELIAKLRSGEADM

SEQ ID NO: 801 - protein, 15 aa, Bordetella pertussis
AKLRSGEADMAGALF

SEQ ID NO: 802 - protein, 15 aa, Bordetella pertussis
GEADMAGALFVNSAR

SEQ ID NO: 803 - protein, 15 aa, Bordetella pertussis
AGALFVNSARESFLS

SEQ ID NO: 804 - protein, 15 aa, Bordetella pertussis
VNSARESFLSFSRPY

SEQ ID NO: 805 - protein, 15 aa, Bordetella pertussis
ESFLSFSRPYVRNGM

SEQ ID NO: 806 - protein, 15 aa, Bordetella pertussis
FSRPYVRNGMVIVTR

SEQ ID NO: 807 - protein, 15 aa, Bordetella pertussis
VRNGMVIVTRQDPDA

SEQ ID NO: 808 - protein, 15 aa, Bordetella pertussis
VIVTRQDPDAPVDAD

SEQ ID NO: 809 - protein, 15 aa, Bordetella pertussis
QDPDAPVDADHLDGR

SEQ ID NO: 810 - protein, 15 aa, Bordetella pertussis
PVDADHLDGRTVALV

SEQ ID NO: 811 - protein, 15 aa, Bordetella pertussis
HLDGRTVALVRNSAA

SEQ ID NO: 812 - protein, 15 aa, Bordetella pertussis
TVALVRNSAAIPLLQ

SEQ ID NO: 813 - protein, 15 aa, Bordetella pertussis
RNSAAIPLLQRRYPQ

SEQ ID NO: 814 - protein, 15 aa, Bordetella pertussis
IPLLQRRYPQAKVVT

SEQ ID NO: 815 - protein, 15 aa, Bordetella pertussis
RRYPQAKVVTADNPS

SEQ ID NO: 816 - protein, 15 aa, Bordetella pertussis
AKVVTADNPSEAMLM

SEQ ID NO: 817 - protein, 15 aa, Bordetella pertussis
ADNPSEAMLMVANGQ

SEQ ID NO: 818 - protein, 15 aa, Bordetella pertussis
EAMLMVANGQADAVV

SEQ ID NO: 819 - protein, 15 aa, Bordetella pertussis
VANGQADAVVQTQIS

SEQ ID NO: 820 - protein, 15 aa, Bordetella pertussis
ADAVVQTQISASYYV

SEQ ID NO: 821 - protein, 15 aa, Bordetella pertussis
QTQISASYYVNRYFA

SEQ ID NO: 822 - protein, 15 aa, Bordetella pertussis
ASYYVNRYFAGKLRI

SEQ ID NO: 823 - protein, 15 aa, Bordetella pertussis
NRYFAGKLRIASALD

SEQ ID NO: 824 - protein, 15 aa, Bordetella pertussis
GKLRIASALDLPPAE

SEQ ID NO: 825 - protein, 15 aa, Bordetella pertussis
ASALDLPPAEIALAT

SEQ ID NO: 826 - protein, 15 aa, Bordetella pertussis
LPPAEIALATTRGQT

SEQ ID NO: 827 - protein, 15 aa, Bordetella pertussis
IALATTRGQTELMSI

SEQ ID NO: 828 - protein, 15 aa, Bordetella pertussis
TRGQTELMSILNKAL

SEQ ID NO: 829 - protein, 15 aa, Bordetella pertussis
ELMSILNKALYSISN

SEQ ID NO: 830 - protein, 15 aa, Bordetella pertussis
LNKALYSISNDELAS

SEQ ID NO: 831 - protein, 15 aa, Bordetella pertussis
YSISNDELASIISRW

SEQ ID NO: 832 - protein, 15 aa, Bordetella pertussis
DELASIISRWRGSDG

SEQ ID NO: 833 - protein, 15 aa, Bordetella pertussis
IISRWRGSDGDPRTW

SEQ ID NO: 834 - protein, 15 aa, Bordetella pertussis
RGSDGDPRTWYAYRN

SEQ ID NO: 835 - protein, 15 aa, Bordetella pertussis
DPRTWYAYRNEIYLL

SEQ ID NO: 836 - protein, 15 aa, Bordetella pertussis
YAYRNEIYLLIGLGL

SEQ ID NO: 837 - protein, 15 aa, Bordetella pertussis
EIYLLIGLGLLSALL

SEQ ID NO: 838 - protein, 15 aa, Bordetella pertussis
IGLGLLSALLFLSWI

SEQ ID NO: 839 - protein, 15 aa, Bordetella pertussis
LSALLFLSWIVYLRR

SEQ ID NO: 840 - protein, 15 aa, Bordetella pertussis
FLSWIVYLRRQIRQR

SEQ ID NO: 841 - protein, 15 aa, Bordetella pertussis
VYLRRQIRQRKRAER

SEQ ID NO: 842 - protein, 15 aa, Bordetella pertussis
QIRQRKRAERALNDQ

SEQ ID NO: 843 - protein, 15 aa, Bordetella pertussis
KRAERALNDQLEFMR

SEQ ID NO: 844 - protein, 15 aa, Bordetella pertussis
ALNDQLEFMRVLIDG

SEQ ID NO: 845 - protein, 15 aa, Bordetella pertussis
LEFMRVLIDGTPNPI

SEQ ID NO: 846 - protein, 15 aa, Bordetella pertussis
VLIDGTPNPIYVRDK

SEQ ID NO: 847 - protein, 15 aa, Bordetella pertussis
TPNPIYVRDKEGRML

SEQ ID NO: 848 - protein, 15 aa, Bordetella pertussis
YVRDKEGRMLLCNDA

SEQ ID NO: 849 - protein, 15 aa, Bordetella pertussis
EGRMLLCNDAYLDTF

SEQ ID NO: 850 - protein, 15 aa, Bordetella pertussis
LCNDAYLDTFGVTAD

SEQ ID NO: 851 - protein, 15 aa, Bordetella pertussis
YLDTFGVTADAVLGK

SEQ ID NO: 852 - protein, 15 aa, Bordetella pertussis
GVTADAVLGKTIPEA

SEQ ID NO: 853 - protein, 15 aa, Bordetella pertussis
AVLGKTIPEANVVGD

SEQ ID NO: 854 - protein, 15 aa, Bordetella pertussis
TIPEANVVGDPALAR

SEQ ID NO: 855 - protein, 15 aa, Bordetella pertussis
NVVGDPALAREMHEF

SEQ ID NO: 856 - protein, 15 aa, Bordetella pertussis
PALAREMHEFLLTRV

SEQ ID NO: 857 - protein, 15 aa, Bordetella pertussis
EMHEFLLTRVAAERE

SEQ ID NO: 858 - protein, 15 aa, Bordetella pertussis
LLTRVAAEREPRFED

SEQ ID NO: 859 - protein, 15 aa, Bordetella pertussis
AAEREPRFEDRDVTL

SEQ ID NO: 860 - protein, 15 aa, Bordetella pertussis
PRFEDRDVTLHGRTR

SEQ ID NO: 861 - protein, 15 aa, Bordetella pertussis
RDVTLHGRTRHVYQW

SEQ ID NO: 862 - protein, 15 aa, Bordetella pertussis
HGRTRHVYQWTIPYG

SEQ ID NO: 863 - protein, 15 aa, Bordetella pertussis
HVYQWTIPYGDSLGE

SEQ ID NO: 864 - protein, 15 aa, Bordetella pertussis
TIPYGDSLGELKGII

SEQ ID NO: 865 - protein, 15 aa, Bordetella pertussis
DSLGELKGIIGGWID

SEQ ID NO: 866 - protein, 15 aa, Bordetella pertussis
LKGIIGGWIDITERA

SEQ ID NO: 867 - protein, 15 aa, Bordetella pertussis
GGWIDITERAELLRK

SEQ ID NO: 868 - protein, 15 aa, Bordetella pertussis
ITERAELLRKLHDAK

SEQ ID NO: 869 - protein, 15 aa, Bordetella pertussis
ELLRKLHDAKESADA

SEQ ID NO: 870 - protein, 15 aa, Bordetella pertussis
LHDAKESADAANRAK

SEQ ID NO: 871 - protein, 15 aa, Bordetella pertussis
ESADAANRAKTTFLA

SEQ ID NO: 872 - protein, 15 aa, Bordetella pertussis
ANRAKTTFLATMSHE

SEQ ID NO: 873 - protein, 15 aa, Bordetella pertussis
TTFLATMSHEIRTPM

SEQ ID NO: 874 - protein, 15 aa, Bordetella pertussis
TMSHEIRTPMNAIIG

SEQ ID NO: 875 - protein, 15 aa, Bordetella pertussis
IRTPMNAIIGMLELA

SEQ ID NO: 876 - protein, 15 aa, Bordetella pertussis
NAIIGMLELALLRPT

SEQ ID NO: 877 - protein, 15 aa, Bordetella pertussis
MLELALLRPTDQEPD

SEQ ID NO: 878 - protein, 15 aa, Bordetella pertussis
LLRPTDQEPDRQSIQ

SEQ ID NO: 879 - protein, 15 aa, Bordetella pertussis
DQEPDRQSIQVAYDS

SEQ ID NO: 880 - protein, 15 aa, Bordetella pertussis
RQSIQVAYDSARSLL

SEQ ID NO: 881 - protein, 15 aa, Bordetella pertussis
VAYDSARSLLELIGD

SEQ ID NO: 882 - protein, 15 aa, Bordetella pertussis
ARSLLELIGDILDIA

SEQ ID NO: 883 - protein, 15 aa, Bordetella pertussis
ELIGDILDIAKIEAG

SEQ ID NO: 884 - protein, 15 aa, Bordetella pertussis
ILDIAKIEAGKFDLA

SEQ ID NO: 885 - protein, 15 aa, Bordetella pertussis
KIEAGKFDLAPVRTA

SEQ ID NO: 886 - protein, 15 aa, Bordetella pertussis
KFDLAPVRTALRVLP

SEQ ID NO: 887 - protein, 15 aa, Bordetella pertussis
PVRTALRVLPEGAIR

SEQ ID NO: 888 - protein, 15 aa, Bordetella pertussis
LRVLPEGAIRVFDGL

SEQ ID NO: 889 - protein, 15 aa, Bordetella pertussis
EGAIRVFDGLARQKG

SEQ ID NO: 890 - protein, 15 aa, Bordetella pertussis
VFDGLARQKGIELVL

SEQ ID NO: 891 - protein, 15 aa, Bordetella pertussis
ARQKGIELVLKTDIV

SEQ ID NO: 892 - protein, 15 aa, Bordetella pertussis
IELVLKTDIVGVDDV

SEQ ID NO: 893 - protein, 15 aa, Bordetella pertussis
KTDIVGVDDVLIDPL

SEQ ID NO: 894 - protein, 15 aa, Bordetella pertussis
GVDDVLIDPLRMKQV

SEQ ID NO: 895 - protein, 15 aa, Bordetella pertussis
LIDPLRMKQVLSNLV

SEQ ID NO: 896 - protein, 15 aa, Bordetella pertussis
RMKQVLSNLVGNAIK

SEQ ID NO: 897 - protein, 15 aa, Bordetella pertussis
LSNLVGNAIKFTTEG

SEQ ID NO: 898 - protein, 15 aa, Bordetella pertussis
GNAIKFTTEGQVVLA

SEQ ID NO: 899 - protein, 15 aa, Bordetella pertussis
FTTEGQVVLAVTARP

SEQ ID NO: 900 - protein, 15 aa, Bordetella pertussis
QVVLAVTARPDGDAA

SEQ ID NO: 901 - protein, 15 aa, Bordetella pertussis
VTARPDGDAAHVQFS

SEQ ID NO: 902 - protein, 15 aa, Bordetella pertussis
DGDAAHVQFSVSDTG

SEQ ID NO: 903 - protein, 15 aa, Bordetella pertussis
HVQFSVSDTGCGISE

SEQ ID NO: 904 - protein, 15 aa, Bordetella pertussis
VSDTGCGISEADQRQ

SEQ ID NO: 905 - protein, 15 aa, Bordetella pertussis
CGISEADQRQLFKPF

SEQ ID NO: 906 - protein, 15 aa, Bordetella pertussis
ADQRQLFKPFSQVGG

SEQ ID NO: 907 - protein, 15 aa, Bordetella pertussis
LFKPFSQVGGSAEAG

SEQ ID NO: 908 - protein, 15 aa, Bordetella pertussis
SQVGGSAEAGPAPGT

SEQ ID NO: 909 - protein, 15 aa, Bordetella pertussis
SAEAGPAPGTGLGLS

SEQ ID NO: 910 - protein, 15 aa, Bordetella pertussis
PAPGTGLGLSISRRL

SEQ ID NO: 911 - protein, 15 aa, Bordetella pertussis
GLGLSISRRLVELMG

SEQ ID NO: 912 - protein, 15 aa, Bordetella pertussis
ISRRLVELMGGTLVM

SEQ ID NO: 913 - protein, 15 aa, Bordetella pertussis
VELMGGTLVMRSAPG

SEQ ID NO: 914 - protein, 15 aa, Bordetella pertussis
GTLVMRSAPGVGTTV

SEQ ID NO: 915 - protein, 15 aa, Bordetella pertussis
RSAPGVGTTVSVDLR

SEQ ID NO: 916 - protein, 15 aa, Bordetella pertussis
VGTTVSVDLRLTMVE

SEQ ID NO: 917 - protein, 15 aa, Bordetella pertussis
SVDLRLTMVEKSVQA

SEQ ID NO: 918 - protein, 15 aa, Bordetella pertussis
LTMVEKSVQAAPPAA

SEQ ID NO: 919 - protein, 15 aa, Bordetella pertussis
KSVQAAPPAAATAAT

SEQ ID NO: 920 - protein, 15 aa, Bordetella pertussis
APPAAATAATPSKPQ

SEQ ID NO: 921 - protein, 15 aa, Bordetella pertussis
ATAATPSKPQVSLRV

SEQ ID NO: 922 - protein, 15 aa, Bordetella pertussis
PSKPQVSLRVLVVDD

SEQ ID NO: 923 - protein, 15 aa, Bordetella pertussis
VSLRVLVVDDHKPNL

SEQ ID NO: 924 - protein, 15 aa, Bordetella pertussis
LVVDDHKPNLMLLRQ

SEQ ID NO: 925 - protein, 15 aa, Bordetella pertussis
HKPNLMLLRQQLDYL

SEQ ID NO: 926 - protein, 15 aa, Bordetella pertussis
MLLRQQLDYLGQRVI

SEQ ID NO: 927 - protein, 15 aa, Bordetella pertussis
QLDYLGQRVIAADSG

SEQ ID NO: 928 - protein, 15 aa, Bordetella pertussis
GQRVIAADSGEAALA

SEQ ID NO: 929 - protein, 15 aa, Bordetella pertussis
AADSGEAALALWREH

SEQ ID NO: 930 - protein, 15 aa, Bordetella pertussis
EAALALWREHAFDVV

SEQ ID NO: 931 - protein, 15 aa, Bordetella pertussis
LWREHAFDVVITDCN

SEQ ID NO: 932 - protein, 15 aa, Bordetella pertussis
AFDVVITDCNMPGIS

SEQ ID NO: 933 - protein, 15 aa, Bordetella pertussis
ITDCNMPGISGYELA

SEQ ID NO: 934 - protein, 15 aa, Bordetella pertussis
MPGISGYELARRIRA

SEQ ID NO: 935 - protein, 15 aa, Bordetella pertussis
GYELARRIRAAEAAP

SEQ ID NO: 936 - protein, 15 aa, Bordetella pertussis
RRIRAAEAAPGYGRT

SEQ ID NO: 937 - protein, 15 aa, Bordetella pertussis
AEAAPGYGRTRCILF

SEQ ID NO: 938 - protein, 15 aa, Bordetella pertussis
GYGRTRCILFGFTAS

SEQ ID NO: 939 - protein, 15 aa, Bordetella pertussis
RCILFGFTASAQMDE

SEQ ID NO: 940 - protein, 15 aa, Bordetella pertussis
GFTASAQMDEAQRCR

SEQ ID NO: 941 - protein, 15 aa, Bordetella pertussis
AQMDEAQRCRAAGMD

SEQ ID NO: 942 - protein, 15 aa, Bordetella pertussis
AQRCRAAGMDDCLFK

SEQ ID NO: 943 - protein, 15 aa, Bordetella pertussis
AAGMDDCLFKPIGVD

SEQ ID NO: 944 - protein, 15 aa, Bordetella pertussis
DCLFKPIGVDALRQR

SEQ ID NO: 945 - protein, 15 aa, Bordetella pertussis
PIGVDALRQRLNEAV

SEQ ID NO: 946 - protein, 15 aa, Bordetella pertussis
ALRQRLNEAVARAAL

SEQ ID NO: 947 - protein, 15 aa, Bordetella pertussis
LNEAVARAALPTPPS

SEQ ID NO: 948 - protein, 15 aa, Bordetella pertussis
ARAALPTPPSPQAAA

SEQ ID NO: 949 - protein, 15 aa, Bordetella pertussis
PTPPSPQAAAPATDD

SEQ ID NO: 950 - protein, 15 aa, Bordetella pertussis
PQAAAPATDDATPTA

SEQ ID NO: 951 - protein, 15 aa, Bordetella pertussis
PATDDATPTAFSAES

SEQ ID NO: 952 - protein, 15 aa, Bordetella pertussis
ATPTAFSAESILALT

SEQ ID NO: 953 - protein, 15 aa, Bordetella pertussis
FSAESILALTQNDEA

SEQ ID NO: 954 - protein, 15 aa, Bordetella pertussis
ILALTQNDEALIRQL

SEQ ID NO: 955 - protein, 15 aa, Bordetella pertussis
QNDEALIRQLLEEVI

SEQ ID NO: 956 - protein, 15 aa, Bordetella pertussis
LIRQLLEEVIRTNRA

SEQ ID NO: 957 - protein, 15 aa, Bordetella pertussis
LEEVIRTNRADVDQL

SEQ ID NO: 958 - protein, 15 aa, Bordetella pertussis
RTNRADVDQLQKLHQ

SEQ ID NO: 959 - protein, 15 aa, Bordetella pertussis
DVDQLQKLHQQADWP

SEQ ID NO: 960 - protein, 15 aa, Bordetella pertussis
QKLHQQADWPKVSDM

SEQ ID NO: 961 - protein, 15 aa, Bordetella pertussis
QADWPKVSDMAHRLA

SEQ ID NO: 962 - protein, 15 aa, Bordetella pertussis
KVSDMAHRLAGGARV

SEQ ID NO: 963 - protein, 15 aa, Bordetella pertussis
AHRLAGGARVVDAKA

SEQ ID NO: 964 - protein, 15 aa, Bordetella pertussis
GGARVVDAKAMIDTV

SEQ ID NO: 965 - protein, 15 aa, Bordetella pertussis
VDAKAMIDTVLALEK

SEQ ID NO: 966 - protein, 15 aa, Bordetella pertussis
MIDTVLALEKKAQGQ

SEQ ID NO: 967 - protein, 15 aa, Bordetella pertussis
LALEKKAQGQAGPSP

SEQ ID NO: 968 - protein, 15 aa, Bordetella pertussis
KAQGQAGPSPEIDGL

SEQ ID NO: 969 - protein, 15 aa, Bordetella pertussis
AGPSPEIDGLVRTLA

SEQ ID NO: 970 - protein, 15 aa, Bordetella pertussis
EIDGLVRTLAAQSAA

SEQ ID NO: 971 - protein, 15 aa, Bordetella pertussis
VRTLAAQSAALETQL

SEQ ID NO: 972 - protein, 15 aa, Bordetella pertussis
AQSAALETQLRAWLE

SEQ ID NO: 973 - protein, 15 aa, Bordetella pertussis
LETQLRAWLEQRPHQ

SEQ ID NO: 974 - protein, 15 aa, Bordetella pertussis
QLRAWLEQRPHQDQP

SEQ ID NO: 975 - protein, 15 aa, Bordetella pertussis
MMRDSPSIQGTLDAA

SEQ ID NO: 976 - protein, 15 aa, Bordetella pertussis
PSIQGTLDAATQHAL

SEQ ID NO: 977 - protein, 15 aa, Bordetella pertussis
TLDAATQHALLAGRH

SEQ ID NO: 978 - protein, 15 aa, Bordetella pertussis
TQHALLAGRHADPFS

SEQ ID NO: 979 - protein, 15 aa, Bordetella pertussis
LAGRHADPFSVLGPH

SEQ ID NO: 980 - protein, 15 aa, Bordetella pertussis
ADPFSVLGPHQAGAH

SEQ ID NO: 981 - protein, 15 aa, Bordetella pertussis
VLGPHQAGAHTVVRV

SEQ ID NO: 982 - protein, 15 aa, Bordetella pertussis
QAGAHTVVRVLAPGA

SEQ ID NO: 983 - protein, 15 aa, Bordetella pertussis
TVVRVLAPGARTVMA

SEQ ID NO: 984 - protein, 15 aa, Bordetella pertussis
LAPGARTVMAVLPGG

SEQ ID NO: 985 - protein, 15 aa, Bordetella pertussis
RTVMAVLPGGQRTPL

SEQ ID NO: 986 - protein, 15 aa, Bordetella pertussis
VLPGGQRTPLLPMQP

SEQ ID NO: 987 - protein, 15 aa, Bordetella pertussis
QRTPLLPMQPGLFEN

SEQ ID NO: 988 - protein, 15 aa, Bordetella pertussis
LPMQPGLFENTVPGL

SEQ ID NO: 989 - protein, 15 aa, Bordetella pertussis
GLFENTVPGLQPGAP

SEQ ID NO: 990 - protein, 15 aa, Bordetella pertussis
TVPGLQPGAPAAYRL

SEQ ID NO: 991 - protein, 15 aa, Bordetella pertussis
QPGAPAAYRLCIEWE

SEQ ID NO: 992 - protein, 15 aa, Bordetella pertussis
AAYRLCIEWEGGIQH

SEQ ID NO: 993 - protein, 15 aa, Bordetella pertussis
CIEWEGGIQHTADPY

SEQ ID NO: 994 - protein, 15 aa, Bordetella pertussis
GGIQHTADPYAFGPV

SEQ ID NO: 995 - protein, 15 aa, Bordetella pertussis
TADPYAFGPVLDAAQ

SEQ ID NO: 996 - protein, 15 aa, Bordetella pertussis
AFGPVLDAAQLDHCA

SEQ ID NO: 997 - protein, 15 aa, Bordetella pertussis
LDAAQLDHCAAGGWR

SEQ ID NO: 998 - protein, 15 aa, Bordetella pertussis
LDHCAAGGWRYLAGL

SEQ ID NO: 999 - protein, 15 aa, Bordetella pertussis
AGGWRYLAGLLGAHA

SEQ ID NO: 1000 - protein, 15 aa, Bordetella pertussis
YLAGLLGAHAASVDG

SEQ ID NO: 1001 - protein, 15 aa, Bordetella pertussis
LGAHAASVDGCAGTR

SEQ ID NO: 1002 - protein, 15 aa, Bordetella pertussis
ASVDGCAGTRFALWA

SEQ ID NO: 1003 - protein, 15 aa, Bordetella pertussis
CAGTRFALWAPNARR

SEQ ID NO: 1004 - protein, 15 aa, Bordetella pertussis
FALWAPNARRVAVVG

SEQ ID NO: 1005 - protein, 15 aa, Bordetella pertussis
PNARRVAVVGDFNGW

SEQ ID NO: 1006 - protein, 15 aa, Bordetella pertussis
VAVVGDFNGWDGRRH

SEQ ID NO: 1007 - protein, 15 aa, Bordetella pertussis
DFNGWDGRRHAMRLR

SEQ ID NO: 1008 - protein, 15 aa, Bordetella pertussis
DGRRHAMRLRYPAGV

SEQ ID NO: 1009 - protein, 15 aa, Bordetella pertussis
AMRLRYPAGVWELFL

SEQ ID NO: 1010 - protein, 15 aa, Bordetella pertussis
YPAGVWELFLPDVGP

SEQ ID NO: 1011 - protein, 15 aa, Bordetella pertussis
WELFLPDVGPGARYK

SEQ ID NO: 1012 - protein, 15 aa, Bordetella pertussis
PDVGPGARYKFQVLG

SEQ ID NO: 1013 - protein, 15 aa, Bordetella pertussis
GARYKFQVLGADGHT

SEQ ID NO: 1014 - protein, 15 aa, Bordetella pertussis
FQVLGADGHTVLKAD

SEQ ID NO: 1015 - protein, 15 aa, Bordetella pertussis
ADGHTVLKADPLARQ

SEQ ID NO: 1016 - protein, 15 aa, Bordetella pertussis
VLKADPLARQAEAPP

SEQ ID NO: 1017 - protein, 15 aa, Bordetella pertussis
PLARQAEAPPATASI

SEQ ID NO: 1018 - protein, 15 aa, Bordetella pertussis
AEAPPATASIVPDER

SEQ ID NO: 1019 - protein, 15 aa, Bordetella pertussis
ATASIVPDERPFAWT

SEQ ID NO: 1020 - protein, 15 aa, Bordetella pertussis
VPDERPFAWTDKAWM

SEQ ID NO: 1021 - protein, 15 aa, Bordetella pertussis
PFAWTDKAWMEQRAA

SEQ ID NO: 1022 - protein, 15 aa, Bordetella pertussis
DKAWMEQRAARQRCD

SEQ ID NO: 1023 - protein, 15 aa, Bordetella pertussis
EQRAARQRCDAPISI

SEQ ID NO: 1024 - protein, 15 aa, Bordetella pertussis
RQRCDAPISIYEVHA

SEQ ID NO: 1025 - protein, 15 aa, Bordetella pertussis
APISIYEVHAGSWFD

SEQ ID NO: 1026 - protein, 15 aa, Bordetella pertussis
YEVHAGSWFDDAGAP

SEQ ID NO: 1027 - protein, 15 aa, Bordetella pertussis
GSWFDDAGAPRWQNL

SEQ ID NO: 1028 - protein, 15 aa, Bordetella pertussis
DAGAPRWQNLAARLP

SEQ ID NO: 1029 - protein, 15 aa, Bordetella pertussis
RWQNLAARLPEYARS

SEQ ID NO: 1030 - protein, 15 aa, Bordetella pertussis
AARLPEYARSLGFTH

SEQ ID NO: 1031 - protein, 15 aa, Bordetella pertussis
EYARSLGFTHIELLP

SEQ ID NO: 1032 - protein, 15 aa, Bordetella pertussis
LGFTHIELLPVMAHP

SEQ ID NO: 1033 - protein, 15 aa, Bordetella pertussis
IELLPVMAHPFGGSW

SEQ ID NO: 1034 - protein, 15 aa, Bordetella pertussis
VMAHPFGGSWGYQPL

SEQ ID NO: 1035 - protein, 15 aa, Bordetella pertussis
FGGSWGYQPLGLFAP

SEQ ID NO: 1036 - protein, 15 aa, Bordetella pertussis
GYQPLGLFAPAAAHG

SEQ ID NO: 1037 - protein, 15 aa, Bordetella pertussis
GLFAPAAAHGAPADF

SEQ ID NO: 1038 - protein, 15 aa, Bordetella pertussis
AAAHGAPADFAHFVD

SEQ ID NO: 1039 - protein, 15 aa, Bordetella pertussis
APADFAHFVDRCHEA

SEQ ID NO: 1040 - protein, 15 aa, Bordetella pertussis
AHFVDRCHEAGLGVI

SEQ ID NO: 1041 - protein, 15 aa, Bordetella pertussis
RCHEAGLGVILDWVP

SEQ ID NO: 1042 - protein, 15 aa, Bordetella pertussis
GLGVILDWVPAHFPD

SEQ ID NO: 1043 - protein, 15 aa, Bordetella pertussis
LDWVPAHFPDDAHGL

SEQ ID NO: 1044 - protein, 15 aa, Bordetella pertussis
AHFPDDAHGLARLDG

SEQ ID NO: 1045 - protein, 15 aa, Bordetella pertussis
DAHGLARLDGTPLYE

SEQ ID NO: 1046 - protein, 15 aa, Bordetella pertussis
ARLDGTPLYEHADPR

SEQ ID NO: 1047 - protein, 15 aa, Bordetella pertussis
TPLYEHADPREGRHP

SEQ ID NO: 1048 - protein, 15 aa, Bordetella pertussis
HADPREGRHPDWNTL

SEQ ID NO: 1049 - protein, 15 aa, Bordetella pertussis
EGRHPDWNTLIYNYG

SEQ ID NO: 1050 - protein, 15 aa, Bordetella pertussis
DWNTLIYNYGRREVR

SEQ ID NO: 1051 - protein, 15 aa, Bordetella pertussis
IYNYGRREVRTFLIA

SEQ ID NO: 1052 - protein, 15 aa, Bordetella pertussis
RREVRTFLIASAIHW

SEQ ID NO: 1053 - protein, 15 aa, Bordetella pertussis
TFLIASAIHWLRHYH

SEQ ID NO: 1054 - protein, 15 aa, Bordetella pertussis
SAIHWLRHYHVDGLR

SEQ ID NO: 1055 - protein, 15 aa, Bordetella pertussis
LRHYHVDGLRVDAVA

SEQ ID NO: 1056 - protein, 15 aa, Bordetella pertussis
VDGLRVDAVASMLYR

SEQ ID NO: 1057 - protein, 15 aa, Bordetella pertussis
VDAVASMLYRDYSRP

SEQ ID NO: 1058 - protein, 15 aa, Bordetella pertussis
SMLYRDYSRPAGQWI

SEQ ID NO: 1059 - protein, 15 aa, Bordetella pertussis
DYSRPAGQWIPNRHG

SEQ ID NO: 1060 - protein, 15 aa, Bordetella pertussis
AGQWIPNRHGRRENL

SEQ ID NO: 1061 - protein, 15 aa, Bordetella pertussis
PNRHGRRENLEAIDF

SEQ ID NO: 1062 - protein, 15 aa, Bordetella pertussis
RRENLEAIDFLRELN

SEQ ID NO: 1063 - protein, 15 aa, Bordetella pertussis
EAIDFLRELNAAVGV

SEQ ID NO: 1064 - protein, 15 aa, Bordetella pertussis
LRELNAAVGVQCPGA

SEQ ID NO: 1065 - protein, 15 aa, Bordetella pertussis
AAVGVQCPGAITVAE

SEQ ID NO: 1066 - protein, 15 aa, Bordetella pertussis
QCPGAITVAEESTAW

SEQ ID NO: 1067 - protein, 15 aa, Bordetella pertussis
ITVAEESTAWPGVTA

SEQ ID NO: 1068 - protein, 15 aa, Bordetella pertussis
ESTAWPGVTAPVANG

SEQ ID NO: 1069 - protein, 15 aa, Bordetella pertussis
PGVTAPVANGGLGFD

SEQ ID NO: 1070 - protein, 15 aa, Bordetella pertussis
PVANGGLGFDYKWNM

SEQ ID NO: 1071 - protein, 15 aa, Bordetella pertussis
GLGFDYKWNMGWMHD

SEQ ID NO: 1072 - protein, 15 aa, Bordetella pertussis
YKWNMGWMHDTLRYM

SEQ ID NO: 1073 - protein, 15 aa, Bordetella pertussis
GWMHDTLRYMRRDPI

SEQ ID NO: 1074 - protein, 15 aa, Bordetella pertussis
TLRYMRRDPIHRRHH

SEQ ID NO: 1075 - protein, 15 aa, Bordetella pertussis
RRDPIHRRHHHHDLS

SEQ ID NO: 1076 - protein, 15 aa, Bordetella pertussis
HRRHHHHDLSFGMVY

SEQ ID NO: 1077 - protein, 15 aa, Bordetella pertussis
HHDLSFGMVYAYAER

SEQ ID NO: 1078 - protein, 15 aa, Bordetella pertussis
FGMVYAYAERFVLPL

SEQ ID NO: 1079 - protein, 15 aa, Bordetella pertussis
AYAERFVLPLSHDEV

SEQ ID NO: 1080 - protein, 15 aa, Bordetella pertussis
FVLPLSHDEVVHGKG

SEQ ID NO: 1081 - protein, 15 aa, Bordetella pertussis
SHDEVVHGKGSLLGK

SEQ ID NO: 1082 - protein, 15 aa, Bordetella pertussis
VHGKGSLLGKMPGER

SEQ ID NO: 1083 - protein, 15 aa, Bordetella pertussis
SLLGKMPGERAAQLA

SEQ ID NO: 1084 - protein, 15 aa, Bordetella pertussis
MPGERAAQLAQLRLY

SEQ ID NO: 1085 - protein, 15 aa, Bordetella pertussis
AAQLAQLRLYYAFMW

SEQ ID NO: 1086 - protein, 15 aa, Bordetella pertussis
QLRLYYAFMWAHPGK

SEQ ID NO: 1087 - protein, 15 aa, Bordetella pertussis
YAFMWAHPGKKLLFM

SEQ ID NO: 1088 - protein, 15 aa, Bordetella pertussis
AHPGKKLLFMGGEFG

SEQ ID NO: 1089 - protein, 15 aa, Bordetella pertussis
KLLFMGGEFGQQGEW

SEQ ID NO: 1090 - protein, 15 aa, Bordetella pertussis
GGEFGQQGEWNHDAM

SEQ ID NO: 1091 - protein, 15 aa, Bordetella pertussis
QQGEWNHDAMLQWSL

SEQ ID NO: 1092 - protein, 15 aa, Bordetella pertussis
NHDAMLQWSLLDDPA

SEQ ID NO: 1093 - protein, 15 aa, Bordetella pertussis
LQWSLLDDPAHRGLQ

SEQ ID NO: 1094 - protein, 15 aa, Bordetella pertussis
LDDPAHRGLQRLVAD

SEQ ID NO: 1095 - protein, 15 aa, Bordetella pertussis
HRGLQRLVADLNHVY

SEQ ID NO: 1096 - protein, 15 aa, Bordetella pertussis
RLVADLNHVYATLPE

SEQ ID NO: 1097 - protein, 15 aa, Bordetella pertussis
LNHVYATLPELHCRD

SEQ ID NO: 1098 - protein, 15 aa, Bordetella pertussis
ATLPELHCRDADPSG

SEQ ID NO: 1099 - protein, 15 aa, Bordetella pertussis
LHCRDADPSGFAWIV

SEQ ID NO: 1100 - protein, 15 aa, Bordetella pertussis
ADPSGFAWIVGDDAD

SEQ ID NO: 1101 - protein, 15 aa, Bordetella pertussis
FAWIVGDDADNSVLA

SEQ ID NO: 1102 - protein, 15 aa, Bordetella pertussis
GDDADNSVLAFARVD

SEQ ID NO: 1103 - protein, 15 aa, Bordetella pertussis
NSVLAFARVDASHCL

SEQ ID NO: 1104 - protein, 15 aa, Bordetella pertussis
FARVDASHCLVAVCN

SEQ ID NO: 1105 - protein, 15 aa, Bordetella pertussis
ASHCLVAVCNFTPVP

SEQ ID NO: 1106 - protein, 15 aa, Bordetella pertussis
VAVCNFTPVPRPGYR

SEQ ID NO: 1107 - protein, 15 aa, Bordetella pertussis
FTPVPRPGYRFGVPH

SEQ ID NO: 1108 - protein, 15 aa, Bordetella pertussis
RPGYRFGVPHAGDWR

SEQ ID NO: 1109 - protein, 15 aa, Bordetella pertussis
FGVPHAGDWRVRVDT

SEQ ID NO: 1110 - protein, 15 aa, Bordetella pertussis
AGDWRVRVDTGATRY

SEQ ID NO: 1111 - protein, 15 aa, Bordetella pertussis
VRVDTGATRYGGAGG

SEQ ID NO: 1112 - protein, 15 aa, Bordetella pertussis
GATRYGGAGGGPPIC

SEQ ID NO: 1113 - protein, 15 aa, Bordetella pertussis
GGAGGGPPICLRSEP

SEQ ID NO: 1114 - protein, 15 aa, Bordetella pertussis
GPPICLRSEPIPAHG

SEQ ID NO: 1115 - protein, 15 aa, Bordetella pertussis
LRSEPIPAHGHPQSL

SEQ ID NO: 1116 - protein, 15 aa, Bordetella pertussis
IPAHGHPQSLVLDLP

SEQ ID NO: 1117 - protein, 15 aa, Bordetella pertussis
HPQSLVLDLPGFTAL

SEQ ID NO: 1118 - protein, 15 aa, Bordetella pertussis
VLDLPGFTALYLRHS

SEQ ID NO: 1119 - protein, 15 aa, Bordetella pertussis
LDLPGFTALYLRHSE

SEQ ID NO: 1120 - protein, 15 aa, Bordetella pertussis
MTVPRPESIIPPAGN

SEQ ID NO: 1121 - protein, 15 aa, Bordetella pertussis
PESIIPPAGNAATGA

SEQ ID NO: 1122 - protein, 15 aa, Bordetella pertussis
PPAGNAATGAAGIAR

SEQ ID NO: 1123 - protein, 15 aa, Bordetella pertussis
AATGAAGIARAFKRA

SEQ ID NO: 1124 - protein, 15 aa, Bordetella pertussis
AGIARAFKRALVSQC

SEQ ID NO: 1125 - protein, 15 aa, Bordetella pertussis
AFKRALVSQCHPNML

SEQ ID NO: 1126 - protein, 15 aa, Bordetella pertussis
LVSQCHPNMLFAVLL

SEQ ID NO: 1127 - protein, 15 aa, Bordetella pertussis
HPNMLFAVLLPFLIA

SEQ ID NO: 1128 - protein, 15 aa, Bordetella pertussis
FAVLLPFLIALLGAI

SEQ ID NO: 1129 - protein, 15 aa, Bordetella pertussis
PFLIALLGAILLLWL

SEQ ID NO: 1130 - protein, 15 aa, Bordetella pertussis
LLGAILLLWLFWTPL

SEQ ID NO: 1131 - protein, 15 aa, Bordetella pertussis
LLLWLFWTPLNEWLR

SEQ ID NO: 1132 - protein, 15 aa, Bordetella pertussis
FWTPLNEWLRFEASQ

SEQ ID NO: 1133 - protein, 15 aa, Bordetella pertussis
NEWLRFEASQWQAIN

SEQ ID NO: 1134 - protein, 15 aa, Bordetella pertussis
FEASQWQAINQVDDW

SEQ ID NO: 1135 - protein, 15 aa, Bordetella pertussis
WQAINQVDDWMVAAG

SEQ ID NO: 1136 - protein, 15 aa, Bordetella pertussis
QVDDWMVAAGLFSLK

SEQ ID NO: 1137 - protein, 15 aa, Bordetella pertussis
MVAAGLFSLKIYLVP

SEQ ID NO: 1138 - protein, 15 aa, Bordetella pertussis
LFSLKIYLVPVIAAA

SEQ ID NO: 1139 - protein, 15 aa, Bordetella pertussis
IYLVPVIAAAILLPI

SEQ ID NO: 1140 - protein, 15 aa, Bordetella pertussis
VIAAAILLPISGILG

SEQ ID NO: 1141 - protein, 15 aa, Bordetella pertussis
ILLPISGILGLAIAA

SEQ ID NO: 1142 - protein, 15 aa, Bordetella pertussis
SGILGLAIAAVFVMP

SEQ ID NO: 1143 - protein, 15 aa, Bordetella pertussis
LAIAAVFVMPLVLRH

SEQ ID NO: 1144 - protein, 15 aa, Bordetella pertussis
VFVMPLVLRHVGGRE

SEQ ID NO: 1145 - protein, 15 aa, Bordetella pertussis
LVLRHVGGREYAGLA

SEQ ID NO: 1146 - protein, 15 aa, Bordetella pertussis
VGGREYAGLARQGRN

SEQ ID NO: 1147 - protein, 15 aa, Bordetella pertussis
YAGLARQGRNATAVS

SEQ ID NO: 1148 - protein, 15 aa, Bordetella pertussis
RQGRNATAVSVWNAL

SEQ ID NO: 1149 - protein, 15 aa, Bordetella pertussis
ATAVSVWNALWVSLA

SEQ ID NO: 1150 - protein, 15 aa, Bordetella pertussis
VWNALWVSLAFGAGW

SEQ ID NO: 1151 - protein, 15 aa, Bordetella pertussis
WVSLAFGAGWLLTLP

SEQ ID NO: 1152 - protein, 15 aa, Bordetella pertussis
FGAGWLLTLPFWLIP

SEQ ID NO: 1153 - protein, 15 aa, Bordetella pertussis
LLTLPFWLIPPMVVI

SEQ ID NO: 1154 - protein, 15 aa, Bordetella pertussis
FWLIPPMVVILSVFW

SEQ ID NO: 1155 - protein, 15 aa, Bordetella pertussis
PMVVILSVFWWAFAF

SEQ ID NO: 1156 - protein, 15 aa, Bordetella pertussis
LSVFWWAFAFTRMLR

SEQ ID NO: 1157 - protein, 15 aa, Bordetella pertussis
WAFAFTRMLRLDAIV

SEQ ID NO: 1158 - protein, 15 aa, Bordetella pertussis
TRMLRLDAIVEHASP

SEQ ID NO: 1159 - protein, 15 aa, Bordetella pertussis
LDAIVEHASPAERAI

SEQ ID NO: 1160 - protein, 15 aa, Bordetella pertussis
EHASPAERAILLKRH

SEQ ID NO: 1161 - protein, 15 aa, Bordetella pertussis
AERAILLKRHNSGFW

SEQ ID NO: 1162 - protein, 15 aa, Bordetella pertussis
LLKRHNSGFWLIGLV

SEQ ID NO: 1163 - protein, 15 aa, Bordetella pertussis
NSGFWLIGLVCSLLN

SEQ ID NO: 1164 - protein, 15 aa, Bordetella pertussis
LIGLVCSLLNLLPPA

SEQ ID NO: 1165 - protein, 15 aa, Bordetella pertussis
CSLLNLLPPAWIILP

SEQ ID NO: 1166 - protein, 15 aa, Bordetella pertussis
LLPPAWIILPVFSGL

SEQ ID NO: 1167 - protein, 15 aa, Bordetella pertussis
WIILPVFSGLVYAHY

SEQ ID NO: 1168 - protein, 15 aa, Bordetella pertussis
VFSGLVYAHYGLDAL

SEQ ID NO: 1169 - protein, 15 aa, Bordetella pertussis
VYAHYGLDALQRLRQ

SEQ ID NO: 1170 - protein, 15 aa, Bordetella pertussis
GLDALQRLRQERAID

SEQ ID NO: 1171 - protein, 15 aa, Bordetella pertussis
LDALQRLRQERAIDV

SEQ ID NO: 1172 - protein, 15 aa, Bordetella pertussis
MYLDRFRQCPSSLQI

SEQ ID NO: 1173 - protein, 15 aa, Bordetella pertussis
FRQCPSSLQIPRSAW

SEQ ID NO: 1174 - protein, 15 aa, Bordetella pertussis
SSLQIPRSAWRLHAL

SEQ ID NO: 1175 - protein, 15 aa, Bordetella pertussis
PRSAWRLHALAAALA

SEQ ID NO: 1176 - protein, 15 aa, Bordetella pertussis
RLHALAAALALAGMA

SEQ ID NO: 1177 - protein, 15 aa, Bordetella pertussis
AAALALAGMARLAPA

SEQ ID NO: 1178 - protein, 15 aa, Bordetella pertussis
LAGMARLAPAAAQAP

SEQ ID NO: 1179 - protein, 15 aa, Bordetella pertussis
RLAPAAAQAPQPPVA

SEQ ID NO: 1180 - protein, 15 aa, Bordetella pertussis
AAQAPQPPVAGAPHA

SEQ ID NO: 1181 - protein, 15 aa, Bordetella pertussis
QPPVAGAPHAQDAGQ

SEQ ID NO: 1182 - protein, 15 aa, Bordetella pertussis
GAPHAQDAGQEGEFD

SEQ ID NO: 1183 - protein, 15 aa, Bordetella pertussis
QDAGQEGEFDHRDNT

SEQ ID NO: 1184 - protein, 15 aa, Bordetella pertussis
EGEFDHRDNTLIAVF

SEQ ID NO: 1185 - protein, 15 aa, Bordetella pertussis
HRDNTLIAVFDDGVG

SEQ ID NO: 1186 - protein, 15 aa, Bordetella pertussis
LIAVFDDGVGINLDD

SEQ ID NO: 1187 - protein, 15 aa, Bordetella pertussis
DDGVGINLDDDPDEL

SEQ ID NO: 1188 - protein, 15 aa, Bordetella pertussis
INLDDDPDELGETAP

SEQ ID NO: 1189 - protein, 15 aa, Bordetella pertussis
DPDELGETAPPTLKD

SEQ ID NO: 1190 - protein, 15 aa, Bordetella pertussis
GETAPPTLKDIHISV

SEQ ID NO: 1191 - protein, 15 aa, Bordetella pertussis
PTLKDIHISVEHKNP

SEQ ID NO: 1192 - protein, 15 aa, Bordetella pertussis
IHISVEHKNPMSKPA

SEQ ID NO: 1193 - protein, 15 aa, Bordetella pertussis
EHKNPMSKPAIGVRV

SEQ ID NO: 1194 - protein, 15 aa, Bordetella pertussis
MSKPAIGVRVSGAGR

SEQ ID NO: 1195 - protein, 15 aa, Bordetella pertussis
IGVRVSGAGRALTLA

SEQ ID NO: 1196 - protein, 15 aa, Bordetella pertussis
SGAGRALTLAGSTID

SEQ ID NO: 1197 - protein, 15 aa, Bordetella pertussis
ALTLAGSTIDATEGG

SEQ ID NO: 1198 - protein, 15 aa, Bordetella pertussis
GSTIDATEGGIPAVV

SEQ ID NO: 1199 - protein, 15 aa, Bordetella pertussis
ATEGGIPAVVRRGGT

SEQ ID NO: 1200 - protein, 15 aa, Bordetella pertussis
IPAVVRRGGTLELDG

SEQ ID NO: 1201 - protein, 15 aa, Bordetella pertussis
RRGGTLELDGVTVAG

SEQ ID NO: 1202 - protein, 15 aa, Bordetella pertussis
LELDGVTVAGGEGME

SEQ ID NO: 1203 - protein, 15 aa, Bordetella pertussis
VTVAGGEGMEPMTVS

SEQ ID NO: 1204 - protein, 15 aa, Bordetella pertussis
GEGMEPMTVSDAGSR

SEQ ID NO: 1205 - protein, 15 aa, Bordetella pertussis
PMTVSDAGSRLSVRG

SEQ ID NO: 1206 - protein, 15 aa, Bordetella pertussis
DAGSRLSVRGGVLGG

SEQ ID NO: 1207 - protein, 15 aa, Bordetella pertussis
LSVRGGVLGGEAPGV

SEQ ID NO: 1208 - protein, 15 aa, Bordetella pertussis
GVLGGEAPGVGLVRA

SEQ ID NO: 1209 - protein, 15 aa, Bordetella pertussis
EAPGVGLVRAAQGGQ

SEQ ID NO: 1210 - protein, 15 aa, Bordetella pertussis
GLVRAAQGGQASIID

SEQ ID NO: 1211 - protein, 15 aa, Bordetella pertussis
AQGGQASIIDATLQS

SEQ ID NO: 1212 - protein, 15 aa, Bordetella pertussis
ASIIDATLQSILGPA

SEQ ID NO: 1213 - protein, 15 aa, Bordetella pertussis
ATLQSILGPALIADG

SEQ ID NO: 1214 - protein, 15 aa, Bordetella pertussis
ILGPALIADGGSISV

SEQ ID NO: 1215 - protein, 15 aa, Bordetella pertussis
LIADGGSISVAGGSI

SEQ ID NO: 1216 - protein, 15 aa, Bordetella pertussis
GSISVAGGSIDMDMG

SEQ ID NO: 1217 - protein, 15 aa, Bordetella pertussis
AGGSIDMDMGPGFPP

SEQ ID NO: 1218 - protein, 15 aa, Bordetella pertussis
DMDMGPGFPPPPPPL

SEQ ID NO: 1219 - protein, 15 aa, Bordetella pertussis
PGFPPPPPPLPGAPL

SEQ ID NO: 1220 - protein, 15 aa, Bordetella pertussis
PPPPLPGAPLAAHPP

SEQ ID NO: 1221 - protein, 15 aa, Bordetella pertussis
PGAPLAAHPPLDRVA

SEQ ID NO: 1222 - protein, 15 aa, Bordetella pertussis
AAHPPLDRVAAVHAG

SEQ ID NO: 1223 - protein, 15 aa, Bordetella pertussis
LDRVAAVHAGQDGKV

SEQ ID NO: 1224 - protein, 15 aa, Bordetella pertussis
AVHAGQDGKVTLREV

SEQ ID NO: 1225 - protein, 15 aa, Bordetella pertussis
QDGKVTLREVALRAH

SEQ ID NO: 1226 - protein, 15 aa, Bordetella pertussis
TLREVALRAHGPQAT

SEQ ID NO: 1227 - protein, 15 aa, Bordetella pertussis
ALRAHGPQATGVYAY

SEQ ID NO: 1228 - protein, 15 aa, Bordetella pertussis
GPQATGVYAYMPGSE

SEQ ID NO: 1229 - protein, 15 aa, Bordetella pertussis
GVYAYMPGSEITLQG

SEQ ID NO: 1230 - protein, 15 aa, Bordetella pertussis
MPGSEITLQGGTVSV

SEQ ID NO: 1231 - protein, 15 aa, Bordetella pertussis
ITLQGGTVSVQGDDG

SEQ ID NO: 1232 - protein, 15 aa, Bordetella pertussis
GTVSVQGDDGAGVVA

SEQ ID NO: 1233 - protein, 15 aa, Bordetella pertussis
QGDDGAGVVAGAGLL

SEQ ID NO: 1234 - protein, 15 aa, Bordetella pertussis
AGVVAGAGLLDALPP

SEQ ID NO: 1235 - protein, 15 aa, Bordetella pertussis
GAGLLDALPPGGTVR

SEQ ID NO: 1236 - protein, 15 aa, Bordetella pertussis
DALPPGGTVRLDGTT

SEQ ID NO: 1237 - protein, 15 aa, Bordetella pertussis
GGTVRLDGTTVSTDG

SEQ ID NO: 1238 - protein, 15 aa, Bordetella pertussis
LDGTTVSTDGANTDA

SEQ ID NO: 1239 - protein, 15 aa, Bordetella pertussis
VSTDGANTDAVLVRG

SEQ ID NO: 1240 - protein, 15 aa, Bordetella pertussis
ANTDAVLVRGDAARA

SEQ ID NO: 1241 - protein, 15 aa, Bordetella pertussis
VLVRGDAARAEVVNT

SEQ ID NO: 1242 - protein, 15 aa, Bordetella pertussis
DAARAEVVNTVLRTA

SEQ ID NO: 1243 - protein, 15 aa, Bordetella pertussis
EVVNTVLRTAKSLAA

SEQ ID NO: 1244 - protein, 15 aa, Bordetella pertussis
VLRTAKSLAAGVSAQ

SEQ ID NO: 1245 - protein, 15 aa, Bordetella pertussis
KSLAAGVSAQHGGRV

SEQ ID NO: 1246 - protein, 15 aa, Bordetella pertussis
GVSAQHGGRVTLRQT

SEQ ID NO: 1247 - protein, 15 aa, Bordetella pertussis
HGGRVTLRQTRIETA

SEQ ID NO: 1248 - protein, 15 aa, Bordetella pertussis
TLRQTRIETAGAGAE

SEQ ID NO: 1249 - protein, 15 aa, Bordetella pertussis
RIETAGAGAEGISVL

SEQ ID NO: 1250 - protein, 15 aa, Bordetella pertussis
GAGAEGISVLGFEPQ

SEQ ID NO: 1251 - protein, 15 aa, Bordetella pertussis
GISVLGFEPQSGSGP

SEQ ID NO: 1252 - protein, 15 aa, Bordetella pertussis
GFEPQSGSGPASVDM

SEQ ID NO: 1253 - protein, 15 aa, Bordetella pertussis
SGSGPASVDMQGGSI

SEQ ID NO: 1254 - protein, 15 aa, Bordetella pertussis
ASVDMQGGSITTTGN

SEQ ID NO: 1255 - protein, 15 aa, Bordetella pertussis
QGGSITTTGNRAAGI

SEQ ID NO: 1256 - protein, 15 aa, Bordetella pertussis
TTTGNRAAGIALTHG

SEQ ID NO: 1257 - protein, 15 aa, Bordetella pertussis
RAAGIALTHGSARLE

SEQ ID NO: 1258 - protein, 15 aa, Bordetella pertussis
ALTHGSARLEGVAVR

SEQ ID NO: 1259 - protein, 15 aa, Bordetella pertussis
SARLEGVAVRAEGSG

SEQ ID NO: 1260 - protein, 15 aa, Bordetella pertussis
GVAVRAEGSGSSAAQ

SEQ ID NO: 1261 - protein, 15 aa, Bordetella pertussis
AEGSGSSAAQLANGT

SEQ ID NO: 1262 - protein, 15 aa, Bordetella pertussis
SSAAQLANGTLVVSA

SEQ ID NO: 1263 - protein, 15 aa, Bordetella pertussis
LANGTLVVSAGSLAS

SEQ ID NO: 1264 - protein, 15 aa, Bordetella pertussis
LVVSAGSLASAQSGA

SEQ ID NO: 1265 - protein, 15 aa, Bordetella pertussis
GSLASAQSGAISVTD

SEQ ID NO: 1266 - protein, 15 aa, Bordetella pertussis
AQSGAISVTDTPLKL

SEQ ID NO: 1267 - protein, 15 aa, Bordetella pertussis
ISVTDTPLKLMPGAL

SEQ ID NO: 1268 - protein, 15 aa, Bordetella pertussis
TPLKLMPGALASSTV

SEQ ID NO: 1269 - protein, 15 aa, Bordetella pertussis
MPGALASSTVSVRLT

SEQ ID NO: 1270 - protein, 15 aa, Bordetella pertussis
ASSTVSVRLTDGATA

SEQ ID NO: 1271 - protein, 15 aa, Bordetella pertussis
SVRLTDGATAQGGNG

SEQ ID NO: 1272 - protein, 15 aa, Bordetella pertussis
DGATAQGGNGVFLQQ

SEQ ID NO: 1273 - protein, 15 aa, Bordetella pertussis
QGGNGVFLQQHSTIP

SEQ ID NO: 1274 - protein, 15 aa, Bordetella pertussis
VFLQQHSTIPVAVAL

SEQ ID NO: 1275 - protein, 15 aa, Bordetella pertussis
HSTIPVAVALESGAL

SEQ ID NO: 1276 - protein, 15 aa, Bordetella pertussis
VAVALESGALARGDI

SEQ ID NO: 1277 - protein, 15 aa, Bordetella pertussis
ESGALARGDIVADGN

SEQ ID NO: 1278 - protein, 15 aa, Bordetella pertussis
ARGDIVADGNKPLDA

SEQ ID NO: 1279 - protein, 15 aa, Bordetella pertussis
VADGNKPLDAGISLS

SEQ ID NO: 1280 - protein, 15 aa, Bordetella pertussis
KPLDAGISLSVASGA

SEQ ID NO: 1281 - protein, 15 aa, Bordetella pertussis
GISLSVASGAAWHGA

SEQ ID NO: 1282 - protein, 15 aa, Bordetella pertussis
VASGAAWHGATQVLQ

SEQ ID NO: 1283 - protein, 15 aa, Bordetella pertussis
AWHGATQVLQSATLG

SEQ ID NO: 1284 - protein, 15 aa, Bordetella pertussis
TQVLQSATLGKGGTW

SEQ ID NO: 1285 - protein, 15 aa, Bordetella pertussis
SATLGKGGTWVVNAD

SEQ ID NO: 1286 - protein, 15 aa, Bordetella pertussis
KGGTWVVNADSRVQD

SEQ ID NO: 1287 - protein, 15 aa, Bordetella pertussis
VVNADSRVQDMSMRG

SEQ ID NO: 1288 - protein, 15 aa, Bordetella pertussis
SRVQDMSMRGGRVEF

SEQ ID NO: 1289 - protein, 15 aa, Bordetella pertussis
MSMRGGRVEFQAPAP

SEQ ID NO: 1290 - protein, 15 aa, Bordetella pertussis
GRVEFQAPAPEASYK

SEQ ID NO: 1291 - protein, 15 aa, Bordetella pertussis
QAPAPEASYKTLTLQ

SEQ ID NO: 1292 - protein, 15 aa, Bordetella pertussis
EASYKTLTLQTLDGN

SEQ ID NO: 1293 - protein, 15 aa, Bordetella pertussis
TLTLQTLDGNGVFVL

SEQ ID NO: 1294 - protein, 15 aa, Bordetella pertussis
TLDGNGVFVLNTNVA

SEQ ID NO: 1295 - protein, 15 aa, Bordetella pertussis
GVFVLNTNVAAGQND

SEQ ID NO: 1296 - protein, 15 aa, Bordetella pertussis
NTNVAAGQNDQLRVT

SEQ ID NO: 1297 - protein, 15 aa, Bordetella pertussis
AGQNDQLRVTGRADG

SEQ ID NO: 1298 - protein, 15 aa, Bordetella pertussis
QLRVTGRADGQHRVL

SEQ ID NO: 1299 - protein, 15 aa, Bordetella pertussis
GRADGQHRVLVRNAG

SEQ ID NO: 1300 - protein, 15 aa, Bordetella pertussis
QHRVLVRNAGGEADS

SEQ ID NO: 1301 - protein, 15 aa, Bordetella pertussis
VRNAGGEADSRGARL

SEQ ID NO: 1302 - protein, 15 aa, Bordetella pertussis
GEADSRGARLGLVHT

SEQ ID NO: 1303 - protein, 15 aa, Bordetella pertussis
RGARLGLVHTQGQGN

SEQ ID NO: 1304 - protein, 15 aa, Bordetella pertussis
GLVHTQGQGNATFRL

SEQ ID NO: 1305 - protein, 15 aa, Bordetella pertussis
QGQGNATFRLANVGK

SEQ ID NO: 1306 - protein, 15 aa, Bordetella pertussis
ATFRLANVGKAVDLG

SEQ ID NO: 1307 - protein, 15 aa, Bordetella pertussis
ANVGKAVDLGTWRYS

SEQ ID NO: 1308 - protein, 15 aa, Bordetella pertussis
AVDLGTWRYSLAEDP

SEQ ID NO: 1309 - protein, 15 aa, Bordetella pertussis
TWRYSLAEDPKTHVW

SEQ ID NO: 1310 - protein, 15 aa, Bordetella pertussis
LAEDPKTHVWSLQRA

SEQ ID NO: 1311 - protein, 15 aa, Bordetella pertussis
KTHVWSLQRAGQALS

SEQ ID NO: 1312 - protein, 15 aa, Bordetella pertussis
SLQRAGQALSGAANA

SEQ ID NO: 1313 - protein, 15 aa, Bordetella pertussis
GQALSGAANAAVNAA

SEQ ID NO: 1314 - protein, 15 aa, Bordetella pertussis
GAANAAVNAADLSSI

SEQ ID NO: 1315 - protein, 15 aa, Bordetella pertussis
AVNAADLSSIALAES

SEQ ID NO: 1316 - protein, 15 aa, Bordetella pertussis
DLSSIALAESNALDK

SEQ ID NO: 1317 - protein, 15 aa, Bordetella pertussis
ALAESNALDKRLGEL

SEQ ID NO: 1318 - protein, 15 aa, Bordetella pertussis
NALDKRLGELRLRAD

SEQ ID NO: 1319 - protein, 15 aa, Bordetella pertussis
RLGELRLRADAGGPW

SEQ ID NO: 1320 - protein, 15 aa, Bordetella pertussis
RLRADAGGPWARTFS

SEQ ID NO: 1321 - protein, 15 aa, Bordetella pertussis
AGGPWARTFSERQQI

SEQ ID NO: 1322 - protein, 15 aa, Bordetella pertussis
ARTFSERQQISNRHA

SEQ ID NO: 1323 - protein, 15 aa, Bordetella pertussis
ERQQISNRHARAYDQ

SEQ ID NO: 1324 - protein, 15 aa, Bordetella pertussis
SNRHARAYDQTVSGL

SEQ ID NO: 1325 - protein, 15 aa, Bordetella pertussis
RAYDQTVSGLEIGLD

SEQ ID NO: 1326 - protein, 15 aa, Bordetella pertussis
TVSGLEIGLDRGWSA

SEQ ID NO: 1327 - protein, 15 aa, Bordetella pertussis
EIGLDRGWSASGGRW

SEQ ID NO: 1328 - protein, 15 aa, Bordetella pertussis
RGWSASGGRWYAGGL

SEQ ID NO: 1329 - protein, 15 aa, Bordetella pertussis
SGGRWYAGGLLGYTY

SEQ ID NO: 1330 - protein, 15 aa, Bordetella pertussis
YAGGLLGYTYADRTY

SEQ ID NO: 1331 - protein, 15 aa, Bordetella pertussis
LGYTYADRTYPGDGG

SEQ ID NO: 1332 - protein, 15 aa, Bordetella pertussis
ADRTYPGDGGGKVKG

SEQ ID NO: 1333 - protein, 15 aa, Bordetella pertussis
PGDGGGKVKGLHVGG

SEQ ID NO: 1334 - protein, 15 aa, Bordetella pertussis
GKVKGLHVGGYAAYV

SEQ ID NO: 1335 - protein, 15 aa, Bordetella pertussis
LHVGGYAAYVGDGGY

SEQ ID NO: 1336 - protein, 15 aa, Bordetella pertussis
YAAYVGDGGYYLDTV

SEQ ID NO: 1337 - protein, 15 aa, Bordetella pertussis
GDGGYYLDTVLRLGR

SEQ ID NO: 1338 - protein, 15 aa, Bordetella pertussis
YLDTVLRLGRYDQQY

SEQ ID NO: 1339 - protein, 15 aa, Bordetella pertussis
LRLGRYDQQYNIAGT

SEQ ID NO: 1340 - protein, 15 aa, Bordetella pertussis
YDQQYNIAGTDGGRV

SEQ ID NO: 1341 - protein, 15 aa, Bordetella pertussis
NIAGTDGGRVTADYR

SEQ ID NO: 1342 - protein, 15 aa, Bordetella pertussis
DGGRVTADYRTSGAA

SEQ ID NO: 1343 - protein, 15 aa, Bordetella pertussis
TADYRTSGAAWSLEG

SEQ ID NO: 1344 - protein, 15 aa, Bordetella pertussis
TSGAAWSLEGGRRFE

SEQ ID NO: 1345 - protein, 15 aa, Bordetella pertussis
WSLEGGRRFELPNDW

SEQ ID NO: 1346 - protein, 15 aa, Bordetella pertussis
GRRFELPNDWFAEPQ

SEQ ID NO: 1347 - protein, 15 aa, Bordetella pertussis
LPNDWFAEPQAEVML

SEQ ID NO: 1348 - protein, 15 aa, Bordetella pertussis
FAEPQAEVMLWRTSG

SEQ ID NO: 1349 - protein, 15 aa, Bordetella pertussis
AEVMLWRTSGKRYRA

SEQ ID NO: 1350 - protein, 15 aa, Bordetella pertussis
WRTSGKRYRASNGLR

SEQ ID NO: 1351 - protein, 15 aa, Bordetella pertussis
KRYRASNGLRVKVDA

SEQ ID NO: 1352 - protein, 15 aa, Bordetella pertussis
SNGLRVKVDANTATL

SEQ ID NO: 1353 - protein, 15 aa, Bordetella pertussis
VKVDANTATLGRLGL

SEQ ID NO: 1354 - protein, 15 aa, Bordetella pertussis
NTATLGRLGLRFGRR

SEQ ID NO: 1355 - protein, 15 aa, Bordetella pertussis
GRLGLRFGRRIALAG

SEQ ID NO: 1356 - protein, 15 aa, Bordetella pertussis
RFGRRIALAGGNIVQ

SEQ ID NO: 1357 - protein, 15 aa, Bordetella pertussis
IALAGGNIVQPYARL

SEQ ID NO: 1358 - protein, 15 aa, Bordetella pertussis
GNIVQPYARLGWTQE

SEQ ID NO: 1359 - protein, 15 aa, Bordetella pertussis
PYARLGWTQEFKSTG

SEQ ID NO: 1360 - protein, 15 aa, Bordetella pertussis
GWTQEFKSTGDVRTN

SEQ ID NO: 1361 - protein, 15 aa, Bordetella pertussis
FKSTGDVRTNGIGHA

SEQ ID NO: 1362 - protein, 15 aa, Bordetella pertussis
DVRTNGIGHAGAGRH

SEQ ID NO: 1363 - protein, 15 aa, Bordetella pertussis
GIGHAGAGRHGRVEL

SEQ ID NO: 1364 - protein, 15 aa, Bordetella pertussis
GAGRHGRVELGAGVD

SEQ ID NO: 1365 - protein, 15 aa, Bordetella pertussis
GRVELGAGVDAALGK

SEQ ID NO: 1366 - protein, 15 aa, Bordetella pertussis
GAGVDAALGKGHNLY

SEQ ID NO: 1367 - protein, 15 aa, Bordetella pertussis
AALGKGHNLYASYEY

SEQ ID NO: 1368 - protein, 15 aa, Bordetella pertussis
GHNLYASYEYAAGDR

SEQ ID NO: 1369 - protein, 15 aa, Bordetella pertussis
ASYEYAAGDRINIPW

SEQ ID NO: 1370 - protein, 15 aa, Bordetella pertussis
AAGDRINIPWSFHAG

SEQ ID NO: 1371 - protein, 15 aa, Bordetella pertussis
INIPWSFHAGYRYSF

SEQ ID NO: 1372 - protein, 15 aa, Bordetella pertussis
MMQSHLDFALATPEI

SEQ ID NO: 1373 - protein, 15 aa, Bordetella pertussis
LDFALATPEILLLVL

SEQ ID NO: 1374 - protein, 15 aa, Bordetella pertussis
ATPEILLLVLGLAIL

SEQ ID NO: 1375 - protein, 15 aa, Bordetella pertussis
LLLVLGLAILLIDAV

SEQ ID NO: 1376 - protein, 15 aa, Bordetella pertussis
GLAILLIDAVSSHPE

SEQ ID NO: 1377 - protein, 15 aa, Bordetella pertussis
LIDAVSSHPERKTTF

SEQ ID NO: 1378 - protein, 15 aa, Bordetella pertussis
SSHPERKTTFVLTLA

SEQ ID NO: 1379 - protein, 15 aa, Bordetella pertussis
RKTTFVLTLATLAAL

SEQ ID NO: 1380 - protein, 15 aa, Bordetella pertussis
VLTLATLAALTVVSL

SEQ ID NO: 1381 - protein, 15 aa, Bordetella pertussis
TLAALTVVSLLQWRD

SEQ ID NO: 1382 - protein, 15 aa, Bordetella pertussis
TVVSLLQWRDGVEGQ

SEQ ID NO: 1383 - protein, 15 aa, Bordetella pertussis
LQWRDGVEGQTFNGL

SEQ ID NO: 1384 - protein, 15 aa, Bordetella pertussis
GVEGQTFNGLYVTDS

SEQ ID NO: 1385 - protein, 15 aa, Bordetella pertussis
TFNGLYVTDSLAHLL

SEQ ID NO: 1386 - protein, 15 aa, Bordetella pertussis
YVTDSLAHLLKVASY

SEQ ID NO: 1387 - protein, 15 aa, Bordetella pertussis
LAHLLKVASYIAVAA

SEQ ID NO: 1388 - protein, 15 aa, Bordetella pertussis
KVASYIAVAATLVYG

SEQ ID NO: 1389 - protein, 15 aa, Bordetella pertussis
IAVAATLVYGRIYAQ

SEQ ID NO: 1390 - protein, 15 aa, Bordetella pertussis
TLVYGRIYAQQRDMM

SEQ ID NO: 1391 - protein, 15 aa, Bordetella pertussis
RIYAQQRDMMQRGGE

SEQ ID NO: 1392 - protein, 15 aa, Bordetella pertussis
QRDMMQRGGELYVLT

SEQ ID NO: 1393 - protein, 15 aa, Bordetella pertussis
QRGGELYVLTLFALL

SEQ ID NO: 1394 - protein, 15 aa, Bordetella pertussis
LYVLTLFALLGQMVM

SEQ ID NO: 1395 - protein, 15 aa, Bordetella pertussis
LFALLGQMVMISAGN

SEQ ID NO: 1396 - protein, 15 aa, Bordetella pertussis
GQMVMISAGNLISIY

SEQ ID NO: 1397 - protein, 15 aa, Bordetella pertussis
ISAGNLISIYLGLEL

SEQ ID NO: 1398 - protein, 15 aa, Bordetella pertussis
LISIYLGLELMSLAL

SEQ ID NO: 1399 - protein, 15 aa, Bordetella pertussis
LGLELMSLALYALIA

SEQ ID NO: 1400 - protein, 15 aa, Bordetella pertussis
MSLALYALIALRRED

SEQ ID NO: 1401 - protein, 15 aa, Bordetella pertussis
YALIALRREDKVATE

SEQ ID NO: 1402 - protein, 15 aa, Bordetella pertussis
LRREDKVATEAAMKY

SEQ ID NO: 1403 - protein, 15 aa, Bordetella pertussis
KVATEAAMKYFVLGA

SEQ ID NO: 1404 - protein, 15 aa, Bordetella pertussis
AAMKYFVLGALASGF

SEQ ID NO: 1405 - protein, 15 aa, Bordetella pertussis
FVLGALASGFLLYGM

SEQ ID NO: 1406 - protein, 15 aa, Bordetella pertussis
LASGFLLYGMSMVYG

SEQ ID NO: 1407 - protein, 15 aa, Bordetella pertussis
LLYGMSMVYGATGHL

SEQ ID NO: 1408 - protein, 15 aa, Bordetella pertussis
SMVYGATGHLDLAKI

SEQ ID NO: 1409 - protein, 15 aa, Bordetella pertussis
ATGHLDLAKIAEVIA

SEQ ID NO: 1410 - protein, 15 aa, Bordetella pertussis
DLAKIAEVIASGQAK

SEQ ID NO: 1411 - protein, 15 aa, Bordetella pertussis
AEVIASGQAKQLPLV

SEQ ID NO: 1412 - protein, 15 aa, Bordetella pertussis
SGQAKQLPLVFGVVF

SEQ ID NO: 1413 - protein, 15 aa, Bordetella pertussis
QLPLVFGVVFLVSGL

SEQ ID NO: 1414 - protein, 15 aa, Bordetella pertussis
FGVVFLVSGLAFKLG

SEQ ID NO: 1415 - protein, 15 aa, Bordetella pertussis
LVSGLAFKLGAVPFH

SEQ ID NO: 1416 - protein, 15 aa, Bordetella pertussis
AFKLGAVPFHMWLPD

SEQ ID NO: 1417 - protein, 15 aa, Bordetella pertussis
AVPFHMWLPDVYQGS

SEQ ID NO: 1418 - protein, 15 aa, Bordetella pertussis
MWLPDVYQGSPTAVT

SEQ ID NO: 1419 - protein, 15 aa, Bordetella pertussis
VYQGSPTAVTLILGA

SEQ ID NO: 1420 - protein, 15 aa, Bordetella pertussis
PTAVTLILGAAPKLA

SEQ ID NO: 1421 - protein, 15 aa, Bordetella pertussis
LILGAAPKLAAFAIT

SEQ ID NO: 1422 - protein, 15 aa, Bordetella pertussis
APKLAAFAITLRLLV

SEQ ID NO: 1423 - protein, 15 aa, Bordetella pertussis
AFAITLRLLVDGLHG

SEQ ID NO: 1424 - protein, 15 aa, Bordetella pertussis
LRLLVDGLHGLAADW

SEQ ID NO: 1425 - protein, 15 aa, Bordetella pertussis
DGLHGLAADWQPMLM

SEQ ID NO: 1426 - protein, 15 aa, Bordetella pertussis
LAADWQPMLMILAVL

SEQ ID NO: 1427 - protein, 15 aa, Bordetella pertussis
QPMLMILAVLSLAIG

SEQ ID NO: 1428 - protein, 15 aa, Bordetella pertussis
ILAVLSLAIGNLTAI

SEQ ID NO: 1429 - protein, 15 aa, Bordetella pertussis
SLAIGNLTAIVQTNF

SEQ ID NO: 1430 - protein, 15 aa, Bordetella pertussis
NLTAIVQTNFKRMLA

SEQ ID NO: 1431 - protein, 15 aa, Bordetella pertussis
VQTNFKRMLAYSTIS

SEQ ID NO: 1432 - protein, 15 aa, Bordetella pertussis
KRMLAYSTISHTGFV

SEQ ID NO: 1433 - protein, 15 aa, Bordetella pertussis
YSTISHTGFVLLGLM

SEQ ID NO: 1434 - protein, 15 aa, Bordetella pertussis
HTGFVLLGLMAGVVD

SEQ ID NO: 1435 - protein, 15 aa, Bordetella pertussis
LLGLMAGVVDGKPDA

SEQ ID NO: 1436 - protein, 15 aa, Bordetella pertussis
AGVVDGKPDAAASAY

SEQ ID NO: 1437 - protein, 15 aa, Bordetella pertussis
GKPDAAASAYGAALF

SEQ ID NO: 1438 - protein, 15 aa, Bordetella pertussis
AASAYGAALFYMLTY

SEQ ID NO: 1439 - protein, 15 aa, Bordetella pertussis
GAALFYMLTYVLTTL

SEQ ID NO: 1440 - protein, 15 aa, Bordetella pertussis
YMLTYVLTTLGTFGI

SEQ ID NO: 1441 - protein, 15 aa, Bordetella pertussis
VLTTLGTFGIILLLA

SEQ ID NO: 1442 - protein, 15 aa, Bordetella pertussis
GTFGIILLLARQGFE

SEQ ID NO: 1443 - protein, 15 aa, Bordetella pertussis
ILLLARQGFECEQID

SEQ ID NO: 1444 - protein, 15 aa, Bordetella pertussis
RQGFECEQIDDLKGL

SEQ ID NO: 1445 - protein, 15 aa, Bordetella pertussis
CEQIDDLKGLNRRNP

SEQ ID NO: 1446 - protein, 15 aa, Bordetella pertussis
DLKGLNRRNPWHAAI

SEQ ID NO: 1447 - protein, 15 aa, Bordetella pertussis
NRRNPWHAAIVLLLM

SEQ ID NO: 1448 - protein, 15 aa, Bordetella pertussis
WHAAIVLLLMFSLAG

SEQ ID NO: 1449 - protein, 15 aa, Bordetella pertussis
VLLLMFSLAGIPPLV

SEQ ID NO: 1450 - protein, 15 aa, Bordetella pertussis
FSLAGIPPLVGFYAK

SEQ ID NO: 1451 - protein, 15 aa, Bordetella pertussis
IPPLVGFYAKLAVLQ

SEQ ID NO: 1452 - protein, 15 aa, Bordetella pertussis
GFYAKLAVLQALVEA

SEQ ID NO: 1453 - protein, 15 aa, Bordetella pertussis
LAVLQALVEAGHVAL

SEQ ID NO: 1454 - protein, 15 aa, Bordetella pertussis
ALVEAGHVALAVVAV

SEQ ID NO: 1455 - protein, 15 aa, Bordetella pertussis
GHVALAVVAVMFSLI

SEQ ID NO: 1456 - protein, 15 aa, Bordetella pertussis
AVVAVMFSLIGAFYY

SEQ ID NO: 1457 - protein, 15 aa, Bordetella pertussis
MFSLIGAFYYLRVVK

SEQ ID NO: 1458 - protein, 15 aa, Bordetella pertussis
GAFYYLRVVKVVYFD

SEQ ID NO: 1459 - protein, 15 aa, Bordetella pertussis
LRVVKVVYFDDPVDQ

SEQ ID NO: 1460 - protein, 15 aa, Bordetella pertussis
VVYFDDPVDQPAALA

SEQ ID NO: 1461 - protein, 15 aa, Bordetella pertussis
DPVDQPAALAVTAGQ

SEQ ID NO: 1462 - protein, 15 aa, Bordetella pertussis
PAALAVTAGQRSILS

SEQ ID NO: 1463 - protein, 15 aa, Bordetella pertussis
VTAGQRSILSLNGAL

SEQ ID NO: 1464 - protein, 15 aa, Bordetella pertussis
RSILSLNGALILVLG

SEQ ID NO: 1465 - protein, 15 aa, Bordetella pertussis
LNGALILVLGILPGG

SEQ ID NO: 1466 - protein, 15 aa, Bordetella pertussis
ILVLGILPGGLMALC

SEQ ID NO: 1467 - protein, 15 aa, Bordetella pertussis
ILPGGLMALCVQVIQ

SEQ ID NO: 1468 - protein, 15 aa, Bordetella pertussis
GLMALCVQVIQASLG

SEQ ID NO: 1469 - protein, 15 aa, Bordetella pertussis
MMQYGHASATGHGAS

SEQ ID NO: 1470 - protein, 15 aa, Bordetella pertussis
HASATGHGASATGRA

SEQ ID NO: 1471 - protein, 15 aa, Bordetella pertussis
GHGASATGRAAAAGR

SEQ ID NO: 1472 - protein, 15 aa, Bordetella pertussis
ATGRAAAAGRWLAWM

SEQ ID NO: 1473 - protein, 15 aa, Bordetella pertussis
AAAGRWLAWMLALAL

SEQ ID NO: 1474 - protein, 15 aa, Bordetella pertussis
WLAWMLALALVLFAR

SEQ ID NO: 1475 - protein, 15 aa, Bordetella pertussis
LALALVLFARPAAAL

SEQ ID NO: 1476 - protein, 15 aa, Bordetella pertussis
VLFARPAAALTEDDF

SEQ ID NO: 1477 - protein, 15 aa, Bordetella pertussis
PAAALTEDDFLPPEQ

SEQ ID NO: 1478 - protein, 15 aa, Bordetella pertussis
TEDDFLPPEQAFVFS

SEQ ID NO: 1479 - protein, 15 aa, Bordetella pertussis
LPPEQAFVFSAAMAD

SEQ ID NO: 1480 - protein, 15 aa, Bordetella pertussis
AFVFSAAMADPATLV

SEQ ID NO: 1481 - protein, 15 aa, Bordetella pertussis
AAMADPATLVLNYRI

SEQ ID NO: 1482 - protein, 15 aa, Bordetella pertussis
PATLVLNYRIAPEYY

SEQ ID NO: 1483 - protein, 15 aa, Bordetella pertussis
LNYRIAPEYYMYRER

SEQ ID NO: 1484 - protein, 15 aa, Bordetella pertussis
APEYYMYRERFGLSA

SEQ ID NO: 1485 - protein, 15 aa, Bordetella pertussis
MYRERFGLSASPAQA

SEQ ID NO: 1486 - protein, 15 aa, Bordetella pertussis
FGLSASPAQAVTLGE

SEQ ID NO: 1487 - protein, 15 aa, Bordetella pertussis
SPAQAVTLGEAAYPQ

SEQ ID NO: 1488 - protein, 15 aa, Bordetella pertussis
VTLGEAAYPQGKVKY

SEQ ID NO: 1489 - protein, 15 aa, Bordetella pertussis
AAYPQGKVKYDPTFD

SEQ ID NO: 1490 - protein, 15 aa, Bordetella pertussis
GKVKYDPTFDKDMEV

SEQ ID NO: 1491 - protein, 15 aa, Bordetella pertussis
DPTFDKDMEVFYGTV

SEQ ID NO: 1492 - protein, 15 aa, Bordetella pertussis
KDMEVFYGTVAVRVP

SEQ ID NO: 1493 - protein, 15 aa, Bordetella pertussis
FYGTVAVRVPLSQGN

SEQ ID NO: 1494 - protein, 15 aa, Bordetella pertussis
AVRVPLSQGNGQPFT

SEQ ID NO: 1495 - protein, 15 aa, Bordetella pertussis
LSQGNGQPFTLTVTS

SEQ ID NO: 1496 - protein, 15 aa, Bordetella pertussis
GQPFTLTVTSQGCAD

SEQ ID NO: 1497 - protein, 15 aa, Bordetella pertussis
LTVTSQGCADAGLCY

SEQ ID NO: 1498 - protein, 15 aa, Bordetella pertussis
QGCADAGLCYPPMDN

SEQ ID NO: 1499 - protein, 15 aa, Bordetella pertussis
AGLCYPPMDNTVQLT

SEQ ID NO: 1500 - protein, 15 aa, Bordetella pertussis
PPMDNTVQLTPVTGG

SEQ ID NO: 1501 - protein, 15 aa, Bordetella pertussis
TVQLTPVTGGYALAA

SEQ ID NO: 1502 - protein, 15 aa, Bordetella pertussis
PVTGGYALAAGTASA

SEQ ID NO: 1503 - protein, 15 aa, Bordetella pertussis
YALAAGTASAPQGGG

SEQ ID NO: 1504 - protein, 15 aa, Bordetella pertussis
GTASAPQGGGTFDSL

SEQ ID NO: 1505 - protein, 15 aa, Bordetella pertussis
PQGGGTFDSLLEAGD

SEQ ID NO: 1506 - protein, 15 aa, Bordetella pertussis
TFDSLLEAGDTRLAD

SEQ ID NO: 1507 - protein, 15 aa, Bordetella pertussis
LEAGDTRLADFIGGG

SEQ ID NO: 1508 - protein, 15 aa, Bordetella pertussis
TRLADFIGGGGWLKT

SEQ ID NO: 1509 - protein, 15 aa, Bordetella pertussis
FIGGGGWLKTAGVFL

SEQ ID NO: 1510 - protein, 15 aa, Bordetella pertussis
GWLKTAGVFLLLGML

SEQ ID NO: 1511 - protein, 15 aa, Bordetella pertussis
AGVFLLLGMLLAFTP

SEQ ID NO: 1512 - protein, 15 aa, Bordetella pertussis
LLGMLLAFTPCVLPM

SEQ ID NO: 1513 - protein, 15 aa, Bordetella pertussis
LAFTPCVLPMVPILS

SEQ ID NO: 1514 - protein, 15 aa, Bordetella pertussis
CVLPMVPILSSIVLG

SEQ ID NO: 1515 - protein, 15 aa, Bordetella pertussis
VPILSSIVLGGAQAQ

SEQ ID NO: 1516 - protein, 15 aa, Bordetella pertussis
SIVLGGAQAQRPSRW

SEQ ID NO: 1517 - protein, 15 aa, Bordetella pertussis
GAQAQRPSRWRGLGL

SEQ ID NO: 1518 - protein, 15 aa, Bordetella pertussis
RPSRWRGLGLAAAYV

SEQ ID NO: 1519 - protein, 15 aa, Bordetella pertussis
RGLGLAAAYVFGMSV

SEQ ID NO: 1520 - protein, 15 aa, Bordetella pertussis
AAAYVFGMSVVYTAL

SEQ ID NO: 1521 - protein, 15 aa, Bordetella pertussis
FGMSVVYTALGVAAG

SEQ ID NO: 1522 - protein, 15 aa, Bordetella pertussis
VYTALGVAAGLSGAG

SEQ ID NO: 1523 - protein, 15 aa, Bordetella pertussis
GVAAGLSGAGLAAWL

SEQ ID NO: 1524 - protein, 15 aa, Bordetella pertussis
LSGAGLAAWLQTPWI

SEQ ID NO: 1525 - protein, 15 aa, Bordetella pertussis
LAAWLQTPWILSLFA

SEQ ID NO: 1526 - protein, 15 aa, Bordetella pertussis
QTPWILSLFAILLAV

SEQ ID NO: 1527 - protein, 15 aa, Bordetella pertussis
LSLFAILLAVLALAM

SEQ ID NO: 1528 - protein, 15 aa, Bordetella pertussis
ILLAVLALAMFGAFT

SEQ ID NO: 1529 - protein, 15 aa, Bordetella pertussis
LALAMFGAFTFQMPA

SEQ ID NO: 1530 - protein, 15 aa, Bordetella pertussis
FGAFTFQMPAGLQAR

SEQ ID NO: 1531 - protein, 15 aa, Bordetella pertussis
FQMPAGLQARLSERS

SEQ ID NO: 1532 - protein, 15 aa, Bordetella pertussis
GLQARLSERSNRIPG

SEQ ID NO: 1533 - protein, 15 aa, Bordetella pertussis
LSERSNRIPGGRVTG

SEQ ID NO: 1534 - protein, 15 aa, Bordetella pertussis
NRIPGGRVTGALVMG

SEQ ID NO: 1535 - protein, 15 aa, Bordetella pertussis
GRVTGALVMGALSAL

SEQ ID NO: 1536 - protein, 15 aa, Bordetella pertussis
ALVMGALSALIVGPC

SEQ ID NO: 1537 - protein, 15 aa, Bordetella pertussis
ALSALIVGPCVAAPL

SEQ ID NO: 1538 - protein, 15 aa, Bordetella pertussis
IVGPCVAAPLAGALL

SEQ ID NO: 1539 - protein, 15 aa, Bordetella pertussis
VAAPLAGALLYISQT

SEQ ID NO: 1540 - protein, 15 aa, Bordetella pertussis
AGALLYISQTGDVIL

SEQ ID NO: 1541 - protein, 15 aa, Bordetella pertussis
YISQTGDVILGGAAL

SEQ ID NO: 1542 - protein, 15 aa, Bordetella pertussis
GDVILGGAALFAMAW

SEQ ID NO: 1543 - protein, 15 aa, Bordetella pertussis
GGAALFAMAWGMGIP

SEQ ID NO: 1544 - protein, 15 aa, Bordetella pertussis
FAMAWGMGIPLLLVG

SEQ ID NO: 1545 - protein, 15 aa, Bordetella pertussis
GMGIPLLLVGASAGT

SEQ ID NO: 1546 - protein, 15 aa, Bordetella pertussis
LLLVGASAGTLLPRT

SEQ ID NO: 1547 - protein, 15 aa, Bordetella pertussis
ASAGTLLPRTGPWME

SEQ ID NO: 1548 - protein, 15 aa, Bordetella pertussis
LLPRTGPWMESVKRV

SEQ ID NO: 1549 - protein, 15 aa, Bordetella pertussis
GPWMESVKRVFGMLL

SEQ ID NO: 1550 - protein, 15 aa, Bordetella pertussis
SVKRVFGMLLLGTAW

SEQ ID NO: 1551 - protein, 15 aa, Bordetella pertussis
FGMLLLGTAWWMLIP

SEQ ID NO: 1552 - protein, 15 aa, Bordetella pertussis
LGTAWWMLIPVVPTW

SEQ ID NO: 1553 - protein, 15 aa, Bordetella pertussis
WMLIPVVPTWVQMLG

SEQ ID NO: 1554 - protein, 15 aa, Bordetella pertussis
VVPTWVQMLGWSFLA

SEQ ID NO: 1555 - protein, 15 aa, Bordetella pertussis
VQMLGWSFLAVVGAV

SEQ ID NO: 1556 - protein, 15 aa, Bordetella pertussis
WSFLAVVGAVMLRAF

SEQ ID NO: 1557 - protein, 15 aa, Bordetella pertussis
VVGAVMLRAFDALPA

SEQ ID NO: 1558 - protein, 15 aa, Bordetella pertussis
MLRAFDALPAGSGAP

SEQ ID NO: 1559 - protein, 15 aa, Bordetella pertussis
DALPAGSGAPRMFAK

SEQ ID NO: 1560 - protein, 15 aa, Bordetella pertussis
GSGAPRMFAKGLGLL

SEQ ID NO: 1561 - protein, 15 aa, Bordetella pertussis
RMFAKGLGLLLALAG

SEQ ID NO: 1562 - protein, 15 aa, Bordetella pertussis
GLGLLLALAGAAWLI

SEQ ID NO: 1563 - protein, 15 aa, Bordetella pertussis
LALAGAAWLIGALSG

SEQ ID NO: 1564 - protein, 15 aa, Bordetella pertussis
AAWLIGALSGGRDVL

SEQ ID NO: 1565 - protein, 15 aa, Bordetella pertussis
GALSGGRDVLAPLSH

SEQ ID NO: 1566 - protein, 15 aa, Bordetella pertussis
GRDVLAPLSHLAARA

SEQ ID NO: 1567 - protein, 15 aa, Bordetella pertussis
APLSHLAARAPAGGA

SEQ ID NO: 1568 - protein, 15 aa, Bordetella pertussis
LAARAPAGGAVAAAG

SEQ ID NO: 1569 - protein, 15 aa, Bordetella pertussis
PAGGAVAAAGPAAVD

SEQ ID NO: 1570 - protein, 15 aa, Bordetella pertussis
VAAAGPAAVDKTRFV

SEQ ID NO: 1571 - protein, 15 aa, Bordetella pertussis
PAAVDKTRFVRVRSN

SEQ ID NO: 1572 - protein, 15 aa, Bordetella pertussis
KTRFVRVRSNAELDA

SEQ ID NO: 1573 - protein, 15 aa, Bordetella pertussis
RVRSNAELDALLARS

SEQ ID NO: 1574 - protein, 15 aa, Bordetella pertussis
AELDALLARSTQPVM

SEQ ID NO: 1575 - protein, 15 aa, Bordetella pertussis
LLARSTQPVMLDFYA

SEQ ID NO: 1576 - protein, 15 aa, Bordetella pertussis
TQPVMLDFYADWCVS

SEQ ID NO: 1577 - protein, 15 aa, Bordetella pertussis
LDFYADWCVSCREME

SEQ ID NO: 1578 - protein, 15 aa, Bordetella pertussis
DWCVSCREMEHFTFS

SEQ ID NO: 1579 - protein, 15 aa, Bordetella pertussis
CREMEHFTFSDPTVA

SEQ ID NO: 1580 - protein, 15 aa, Bordetella pertussis
HFTFSDPTVAARMSQ

SEQ ID NO: 1581 - protein, 15 aa, Bordetella pertussis
DPTVAARMSQMLLVQ

SEQ ID NO: 1582 - protein, 15 aa, Bordetella pertussis
ARMSQMLLVQADVTK

SEQ ID NO: 1583 - protein, 15 aa, Bordetella pertussis
MLLVQADVTKNNADD

SEQ ID NO: 1584 - protein, 15 aa, Bordetella pertussis
ADVTKNNADDRALLK

SEQ ID NO: 1585 - protein, 15 aa, Bordetella pertussis
NNADDRALLKRFRLF

SEQ ID NO: 1586 - protein, 15 aa, Bordetella pertussis
RALLKRFRLFGPPGI

SEQ ID NO: 1587 - protein, 15 aa, Bordetella pertussis
RFRLFGPPGIMFFEP

SEQ ID NO: 1588 - protein, 15 aa, Bordetella pertussis
GPPGIMFFEPGGKLI

SEQ ID NO: 1589 - protein, 15 aa, Bordetella pertussis
MFFEPGGKLIEDIRV

SEQ ID NO: 1590 - protein, 15 aa, Bordetella pertussis
GGKLIEDIRVVGFQD

SEQ ID NO: 1591 - protein, 15 aa, Bordetella pertussis
EDIRVVGFQDARRFA

SEQ ID NO: 1592 - protein, 15 aa, Bordetella pertussis
VGFQDARRFAGVLEQ

SEQ ID NO: 1593 - protein, 15 aa, Bordetella pertussis
ARRFAGVLEQVADRS

SEQ ID NO: 1594 - protein, 15 aa, Bordetella pertussis
GVLEQVADRSGAPGP

SEQ ID NO: 1595 - protein, 15 aa, Bordetella pertussis
VADRSGAPGPAQAGS

SEQ ID NO: 1596 - protein, 15 aa, Bordetella pertussis
MQQSHQAGYANAADR

SEQ ID NO: 1597 - protein, 15 aa, Bordetella pertussis
QAGYANAADRESGIP

SEQ ID NO: 1598 - protein, 15 aa, Bordetella pertussis
NAADRESGIPAAVLD

SEQ ID NO: 1599 - protein, 15 aa, Bordetella pertussis
ESGIPAAVLDGIKAV

SEQ ID NO: 1600 - protein, 15 aa, Bordetella pertussis
AAVLDGIKAVAKEKN

SEQ ID NO: 1601 - protein, 15 aa, Bordetella pertussis
GIKAVAKEKNATLMF

SEQ ID NO: 1602 - protein, 15 aa, Bordetella pertussis
AKEKNATLMFRLVNP

SEQ ID NO: 1603 - protein, 15 aa, Bordetella pertussis
ATLMFRLVNPHSTSL

SEQ ID NO: 1604 - protein, 15 aa, Bordetella pertussis
RLVNPHSTSLIAEGV

SEQ ID NO: 1605 - protein, 15 aa, Bordetella pertussis
HSTSLIAEGVATKGL

SEQ ID NO: 1606 - protein, 15 aa, Bordetella pertussis
IAEGVATKGLGVHAK

SEQ ID NO: 1607 - protein, 15 aa, Bordetella pertussis
ATKGLGVHAKSSDWG

SEQ ID NO: 1608 - protein, 15 aa, Bordetella pertussis
GVHAKSSDWGLQAGY

SEQ ID NO: 1609 - protein, 15 aa, Bordetella pertussis
SSDWGLQAGYIPVNP

SEQ ID NO: 1610 - protein, 15 aa, Bordetella pertussis
LQAGYIPVNPNLSKL

SEQ ID NO: 1611 - protein, 15 aa, Bordetella pertussis
IPVNPNLSKLFGRAP

SEQ ID NO: 1612 - protein, 15 aa, Bordetella pertussis
NLSKLFGRAPEVIAR

SEQ ID NO: 1613 - protein, 15 aa, Bordetella pertussis
FGRAPEVIARADNDV

SEQ ID NO: 1614 - protein, 15 aa, Bordetella pertussis
EVIARADNDVNSSLA

SEQ ID NO: 1615 - protein, 15 aa, Bordetella pertussis
ADNDVNSSLAHGHTA

SEQ ID NO: 1616 - protein, 15 aa, Bordetella pertussis
NSSLAHGHTAVDLTL

SEQ ID NO: 1617 - protein, 15 aa, Bordetella pertussis
HGHTAVDLTLSKERL

SEQ ID NO: 1618 - protein, 15 aa, Bordetella pertussis
VDLTLSKERLDYLRQ

SEQ ID NO: 1619 - protein, 15 aa, Bordetella pertussis
SKERLDYLRQAGLVT

SEQ ID NO: 1620 - protein, 15 aa, Bordetella pertussis
DYLRQAGLVTGMADG

SEQ ID NO: 1621 - protein, 15 aa, Bordetella pertussis
AGLVTGMADGVVASN

SEQ ID NO: 1622 - protein, 15 aa, Bordetella pertussis
GMADGVVASNHAGYE

SEQ ID NO: 1623 - protein, 15 aa, Bordetella pertussis
VVASNHAGYEQFEFR

SEQ ID NO: 1624 - protein, 15 aa, Bordetella pertussis
HAGYEQFEFRVKETS

SEQ ID NO: 1625 - protein, 15 aa, Bordetella pertussis
QFEFRVKETSDGRYA

SEQ ID NO: 1626 - protein, 15 aa, Bordetella pertussis
VKETSDGRYAVQYRR

SEQ ID NO: 1627 - protein, 15 aa, Bordetella pertussis
DGRYAVQYRRKGGDD

SEQ ID NO: 1628 - protein, 15 aa, Bordetella pertussis
VQYRRKGGDDFEAVK

SEQ ID NO: 1629 - protein, 15 aa, Bordetella pertussis
KGGDDFEAVKVIGNA

SEQ ID NO: 1630 - protein, 15 aa, Bordetella pertussis
FEAVKVIGNAAGIPL

SEQ ID NO: 1631 - protein, 15 aa, Bordetella pertussis
VIGNAAGIPLTADID

SEQ ID NO: 1632 - protein, 15 aa, Bordetella pertussis
AGIPLTADIDMFAIM

SEQ ID NO: 1633 - protein, 15 aa, Bordetella pertussis
TADIDMFAIMPHLSN

SEQ ID NO: 1634 - protein, 15 aa, Bordetella pertussis
MFAIMPHLSNFRDSA

SEQ ID NO: 1635 - protein, 15 aa, Bordetella pertussis
PHLSNFRDSARSSVT

SEQ ID NO: 1636 - protein, 15 aa, Bordetella pertussis
FRDSARSSVTSGDSV

SEQ ID NO: 1637 - protein, 15 aa, Bordetella pertussis
RSSVTSGDSVTDYLA

SEQ ID NO: 1638 - protein, 15 aa, Bordetella pertussis
SGDSVTDYLARTRRA

SEQ ID NO: 1639 - protein, 15 aa, Bordetella pertussis
TDYLARTRRAASEAT

SEQ ID NO: 1640 - protein, 15 aa, Bordetella pertussis
RTRRAASEATGGLDR

SEQ ID NO: 1641 - protein, 15 aa, Bordetella pertussis
ASEATGGLDRERIDL

SEQ ID NO: 1642 - protein, 15 aa, Bordetella pertussis
GGLDRERIDLLWKIA

SEQ ID NO: 1643 - protein, 15 aa, Bordetella pertussis
ERIDLLWKIARAGAR

SEQ ID NO: 1644 - protein, 15 aa, Bordetella pertussis
LWKIARAGARSAVGT

SEQ ID NO: 1645 - protein, 15 aa, Bordetella pertussis
RAGARSAVGTEARRQ

SEQ ID NO: 1646 - protein, 15 aa, Bordetella pertussis
SAVGTEARRQFRYDG

SEQ ID NO: 1647 - protein, 15 aa, Bordetella pertussis
EARRQFRYDGDMNIG

SEQ ID NO: 1648 - protein, 15 aa, Bordetella pertussis
FRYDGDMNIGVITDF

SEQ ID NO: 1649 - protein, 15 aa, Bordetella pertussis
DMNIGVITDFELEVR

SEQ ID NO: 1650 - protein, 15 aa, Bordetella pertussis
VITDFELEVRNALNR

SEQ ID NO: 1651 - protein, 15 aa, Bordetella pertussis
ELEVRNALNRRAHAV

SEQ ID NO: 1652 - protein, 15 aa, Bordetella pertussis
NALNRRAHAVGAQDV

SEQ ID NO: 1653 - protein, 15 aa, Bordetella pertussis
RAHAVGAQDVVQHGT

SEQ ID NO: 1654 - protein, 15 aa, Bordetella pertussis
GAQDVVQHGTEQNNP

SEQ ID NO: 1655 - protein, 15 aa, Bordetella pertussis
VQHGTEQNNPFPEAD

SEQ ID NO: 1656 - protein, 15 aa, Bordetella pertussis
EQNNPFPEADEKIFV

SEQ ID NO: 1657 - protein, 15 aa, Bordetella pertussis
FPEADEKIFVVSATG

SEQ ID NO: 1658 - protein, 15 aa, Bordetella pertussis
EKIFVVSATGESQML

SEQ ID NO: 1659 - protein, 15 aa, Bordetella pertussis
VSATGESQMLTRGQL

SEQ ID NO: 1660 - protein, 15 aa, Bordetella pertussis
ESQMLTRGQLKEYIG

SEQ ID NO: 1661 - protein, 15 aa, Bordetella pertussis
TRGQLKEYIGQQRGE

SEQ ID NO: 1662 - protein, 15 aa, Bordetella pertussis
KEYIGQQRGEGYVFY

SEQ ID NO: 1663 - protein, 15 aa, Bordetella pertussis
QQRGEGYVFYENRAY

SEQ ID NO: 1664 - protein, 15 aa, Bordetella pertussis
GYVFYENRAYGVAGK

SEQ ID NO: 1665 - protein, 15 aa, Bordetella pertussis
ENRAYGVAGKSLFDD

SEQ ID NO: 1666 - protein, 15 aa, Bordetella pertussis
GVAGKSLFDDGLGAA

SEQ ID NO: 1667 - protein, 15 aa, Bordetella pertussis
SLFDDGLGAAPGVPS

SEQ ID NO: 1668 - protein, 15 aa, Bordetella pertussis
GLGAAPGVPSGRSKF

SEQ ID NO: 1669 - protein, 15 aa, Bordetella pertussis
PGVPSGRSKFSPDVL

SEQ ID NO: 1670 - protein, 15 aa, Bordetella pertussis
GRSKFSPDVLETVPA

SEQ ID NO: 1671 - protein, 15 aa, Bordetella pertussis
SPDVLETVPASPGLR

SEQ ID NO: 1672 - protein, 15 aa, Bordetella pertussis
ETVPASPGLRRPSLG

SEQ ID NO: 1673 - protein, 15 aa, Bordetella pertussis
SPGLRRPSLGAVERQ

SEQ ID NO: 1674 - protein, 15 aa, Bordetella pertussis
RPSLGAVERQDSGYD

SEQ ID NO: 1675 - protein, 15 aa, Bordetella pertussis
AVERQDSGYDSLDGV

SEQ ID NO: 1676 - protein, 15 aa, Bordetella pertussis
DSGYDSLDGVGSRSF

SEQ ID NO: 1677 - protein, 15 aa, Bordetella pertussis
SLDGVGSRSFSLGEV

SEQ ID NO: 1678 - protein, 15 aa, Bordetella pertussis
GSRSFSLGEVSDMAA

SEQ ID NO: 1679 - protein, 15 aa, Bordetella pertussis
SLGEVSDMAAVEAAE

SEQ ID NO: 1680 - protein, 15 aa, Bordetella pertussis
SDMAAVEAAELEMTR

SEQ ID NO: 1681 - protein, 15 aa, Bordetella pertussis
VEAAELEMTRQVLHA

SEQ ID NO: 1682 - protein, 15 aa, Bordetella pertussis
LEMTRQVLHAGARQD

SEQ ID NO: 1683 - protein, 15 aa, Bordetella pertussis
QVLHAGARQDDAEPG

SEQ ID NO: 1684 - protein, 15 aa, Bordetella pertussis
GARQDDAEPGVSGAS

SEQ ID NO: 1685 - protein, 15 aa, Bordetella pertussis
DAEPGVSGASAHWGQ

SEQ ID NO: 1686 - protein, 15 aa, Bordetella pertussis
VSGASAHWGQRALQG

SEQ ID NO: 1687 - protein, 15 aa, Bordetella pertussis
AHWGQRALQGAQAVA

SEQ ID NO: 1688 - protein, 15 aa, Bordetella pertussis
RALQGAQAVAAAQRL

SEQ ID NO: 1689 - protein, 15 aa, Bordetella pertussis
AQAVAAAQRLVHAIA

SEQ ID NO: 1690 - protein, 15 aa, Bordetella pertussis
AAQRLVHAIALMTQF

SEQ ID NO: 1691 - protein, 15 aa, Bordetella pertussis
VHAIALMTQFGRAGS

SEQ ID NO: 1692 - protein, 15 aa, Bordetella pertussis
LMTQFGRAGSTNTPQ

SEQ ID NO: 1693 - protein, 15 aa, Bordetella pertussis
GRAGSTNTPQEAASL

SEQ ID NO: 1694 - protein, 15 aa, Bordetella pertussis
TNTPQEAASLSAAVF

SEQ ID NO: 1695 - protein, 15 aa, Bordetella pertussis
EAASLSAAVFGLGEA

SEQ ID NO: 1696 - protein, 15 aa, Bordetella pertussis
SAAVFGLGEASSAVA

SEQ ID NO: 1697 - protein, 15 aa, Bordetella pertussis
GLGEASSAVAETVSG

SEQ ID NO: 1698 - protein, 15 aa, Bordetella pertussis
SSAVAETVSGFFRGS

SEQ ID NO: 1699 - protein, 15 aa, Bordetella pertussis
ETVSGFFRGSSRWAG

SEQ ID NO: 1700 - protein, 15 aa, Bordetella pertussis
FFRGSSRWAGGFGVA

SEQ ID NO: 1701 - protein, 15 aa, Bordetella pertussis
SRWAGGFGVAGGAMA

SEQ ID NO: 1702 - protein, 15 aa, Bordetella pertussis
GFGVAGGAMALGGGI

SEQ ID NO: 1703 - protein, 15 aa, Bordetella pertussis
GGAMALGGGIAAAVG

SEQ ID NO: 1704 - protein, 15 aa, Bordetella pertussis
LGGGIAAAVGAGMSL

SEQ ID NO: 1705 - protein, 15 aa, Bordetella pertussis
AAAVGAGMSLTDDAP

SEQ ID NO: 1706 - protein, 15 aa, Bordetella pertussis
AGMSLTDDAPAGQKA

SEQ ID NO: 1707 - protein, 15 aa, Bordetella pertussis
TDDAPAGQKAAAGAE

SEQ ID NO: 1708 - protein, 15 aa, Bordetella pertussis
AGQKAAAGAEIALQL

SEQ ID NO: 1709 - protein, 15 aa, Bordetella pertussis
AAGAEIALQLTGGTV

SEQ ID NO: 1710 - protein, 15 aa, Bordetella pertussis
IALQLTGGTVELASS

SEQ ID NO: 1711 - protein, 15 aa, Bordetella pertussis
TGGTVELASSIALAL

SEQ ID NO: 1712 - protein, 15 aa, Bordetella pertussis
ELASSIALALAAARG

SEQ ID NO: 1713 - protein, 15 aa, Bordetella pertussis
IALALAAARGVTSGL

SEQ ID NO: 1714 - protein, 15 aa, Bordetella pertussis
AAARGVTSGLQVAGA

SEQ ID NO: 1715 - protein, 15 aa, Bordetella pertussis
VTSGLQVAGASAGAA

SEQ ID NO: 1716 - protein, 15 aa, Bordetella pertussis
QVAGASAGAAAGALA

SEQ ID NO: 1717 - protein, 15 aa, Bordetella pertussis
SAGAAAGALAAALSP

SEQ ID NO: 1718 - protein, 15 aa, Bordetella pertussis
AGALAAALSPMEIYG

SEQ ID NO: 1719 - protein, 15 aa, Bordetella pertussis
AALSPMEIYGLVQQS

SEQ ID NO: 1720 - protein, 15 aa, Bordetella pertussis
MEIYGLVQQSHYADQ

SEQ ID NO: 1721 - protein, 15 aa, Bordetella pertussis
LVQQSHYADQLDKLA

SEQ ID NO: 1722 - protein, 15 aa, Bordetella pertussis
HYADQLDKLAQESSA

SEQ ID NO: 1723 - protein, 15 aa, Bordetella pertussis
LDKLAQESSAYGYEG

SEQ ID NO: 1724 - protein, 15 aa, Bordetella pertussis
QESSAYGYEGDALLA

SEQ ID NO: 1725 - protein, 15 aa, Bordetella pertussis
YGYEGDALLAQLYRD

SEQ ID NO: 1726 - protein, 15 aa, Bordetella pertussis
DALLAQLYRDKTAAE

SEQ ID NO: 1727 - protein, 15 aa, Bordetella pertussis
QLYRDKTAAEGAVAG

SEQ ID NO: 1728 - protein, 15 aa, Bordetella pertussis
KTAAEGAVAGVSAVL

SEQ ID NO: 1729 - protein, 15 aa, Bordetella pertussis
GAVAGVSAVLSTVGA

SEQ ID NO: 1730 - protein, 15 aa, Bordetella pertussis
VSAVLSTVGAAVSIA

SEQ ID NO: 1731 - protein, 15 aa, Bordetella pertussis
STVGAAVSIAAAASV

SEQ ID NO: 1732 - protein, 15 aa, Bordetella pertussis
AVSIAAAASVVGAPV

SEQ ID NO: 1733 - protein, 15 aa, Bordetella pertussis
AAASVVGAPVAVVTS

SEQ ID NO: 1734 - protein, 15 aa, Bordetella pertussis
VGAPVAVVTSLLTGA

SEQ ID NO: 1735 - protein, 15 aa, Bordetella pertussis
AVVTSLLTGALNGIL

SEQ ID NO: 1736 - protein, 15 aa, Bordetella pertussis
LLTGALNGILRGVQQ

SEQ ID NO: 1737 - protein, 15 aa, Bordetella pertussis
LNGILRGVQQPIIEK

SEQ ID NO: 1738 - protein, 15 aa, Bordetella pertussis
RGVQQPIIEKLANDY

SEQ ID NO: 1739 - protein, 15 aa, Bordetella pertussis
PIIEKLANDYARKID

SEQ ID NO: 1740 - protein, 15 aa, Bordetella pertussis
LANDYARKIDELGGP

SEQ ID NO: 1741 - protein, 15 aa, Bordetella pertussis
ARKIDELGGPQAYFE

SEQ ID NO: 1742 - protein, 15 aa, Bordetella pertussis
ELGGPQAYFEKNLQA

SEQ ID NO: 1743 - protein, 15 aa, Bordetella pertussis
QAYFEKNLQARHEQL

SEQ ID NO: 1744 - protein, 15 aa, Bordetella pertussis
KNLQARHEQLANSDG

SEQ ID NO: 1745 - protein, 15 aa, Bordetella pertussis
RHEQLANSDGLRKML

SEQ ID NO: 1746 - protein, 15 aa, Bordetella pertussis
ANSDGLRKMLADLQA

SEQ ID NO: 1747 - protein, 15 aa, Bordetella pertussis
LRKMLADLQAGWNAS

SEQ ID NO: 1748 - protein, 15 aa, Bordetella pertussis
ADLQAGWNASSVIGV

SEQ ID NO: 1749 - protein, 15 aa, Bordetella pertussis
GWNASSVIGVQTTEI

SEQ ID NO: 1750 - protein, 15 aa, Bordetella pertussis
SVIGVQTTEISKSAL

SEQ ID NO: 1751 - protein, 15 aa, Bordetella pertussis
QTTEISKSALELAAI

SEQ ID NO: 1752 - protein, 15 aa, Bordetella pertussis
SKSALELAAITGNAD

SEQ ID NO: 1753 - protein, 15 aa, Bordetella pertussis
ELAAITGNADNLKSV

SEQ ID NO: 1754 - protein, 15 aa, Bordetella pertussis
TGNADNLKSVDVFVD

SEQ ID NO: 1755 - protein, 15 aa, Bordetella pertussis
NLKSVDVFVDRFVQG

SEQ ID NO: 1756 - protein, 15 aa, Bordetella pertussis
DVFVDRFVQGERVAG

SEQ ID NO: 1757 - protein, 15 aa, Bordetella pertussis
RFVQGERVAGQPVVL

SEQ ID NO: 1758 - protein, 15 aa, Bordetella pertussis
ERVAGQPVVLDVAAG

SEQ ID NO: 1759 - protein, 15 aa, Bordetella pertussis
QPVVLDVAAGGIDIA

SEQ ID NO: 1760 - protein, 15 aa, Bordetella pertussis
DVAAGGIDIASRKGE

SEQ ID NO: 1761 - protein, 15 aa, Bordetella pertussis
GIDIASRKGERPALT

SEQ ID NO: 1762 - protein, 15 aa, Bordetella pertussis
SRKGERPALTFITPL

SEQ ID NO: 1763 - protein, 15 aa, Bordetella pertussis
RPALTFITPLAAPGE

SEQ ID NO: 1764 - protein, 15 aa, Bordetella pertussis
FITPLAAPGEEQRRR

SEQ ID NO: 1765 - protein, 15 aa, Bordetella pertussis
AAPGEEQRRRTKTGK

SEQ ID NO: 1766 - protein, 15 aa, Bordetella pertussis
EQRRRTKTGKSEFTT

SEQ ID NO: 1767 - protein, 15 aa, Bordetella pertussis
TKTGKSEFTTFVEIV

SEQ ID NO: 1768 - protein, 15 aa, Bordetella pertussis
SEFTTFVEIVGKQDR

SEQ ID NO: 1769 - protein, 15 aa, Bordetella pertussis
FVEIVGKQDRWRIRD

SEQ ID NO: 1770 - protein, 15 aa, Bordetella pertussis
GKQDRWRIRDGAADT

SEQ ID NO: 1771 - protein, 15 aa, Bordetella pertussis
WRIRDGAADTTIDLA

SEQ ID NO: 1772 - protein, 15 aa, Bordetella pertussis
GAADTTIDLAKVVSQ

SEQ ID NO: 1773 - protein, 15 aa, Bordetella pertussis
TIDLAKVVSQLVDAN

SEQ ID NO: 1774 - protein, 15 aa, Bordetella pertussis
KVVSQLVDANGVLKH

SEQ ID NO: 1775 - protein, 15 aa, Bordetella pertussis
LVDANGVLKHSIKLD

SEQ ID NO: 1776 - protein, 15 aa, Bordetella pertussis
GVLKHSIKLDVIGGD

SEQ ID NO: 1777 - protein, 15 aa, Bordetella pertussis
SIKLDVIGGDGDDVV

SEQ ID NO: 1778 - protein, 15 aa, Bordetella pertussis
VIGGDGDDVVLANAS

SEQ ID NO: 1779 - protein, 15 aa, Bordetella pertussis
GDDVVLANASRIHYD

SEQ ID NO: 1780 - protein, 15 aa, Bordetella pertussis
LANASRIHYDGGAGT

SEQ ID NO: 1781 - protein, 15 aa, Bordetella pertussis
RIHYDGGAGTNTVSY

SEQ ID NO: 1782 - protein, 15 aa, Bordetella pertussis
GGAGTNTVSYAALGR

SEQ ID NO: 1783 - protein, 15 aa, Bordetella pertussis
NTVSYAALGRQDSIT

SEQ ID NO: 1784 - protein, 15 aa, Bordetella pertussis
AALGRQDSITVSADG

SEQ ID NO: 1785 - protein, 15 aa, Bordetella pertussis
QDSITVSADGERFNV

SEQ ID NO: 1786 - protein, 15 aa, Bordetella pertussis
VSADGERFNVRKQLN

SEQ ID NO: 1787 - protein, 15 aa, Bordetella pertussis
ERFNVRKQLNNANVY

SEQ ID NO: 1788 - protein, 15 aa, Bordetella pertussis
RKQLNNANVYREGVA

SEQ ID NO: 1789 - protein, 15 aa, Bordetella pertussis
NANVYREGVATQTTA

SEQ ID NO: 1790 - protein, 15 aa, Bordetella pertussis
REGVATQTTAYGKRT

SEQ ID NO: 1791 - protein, 15 aa, Bordetella pertussis
TQTTAYGKRTENVQY

SEQ ID NO: 1792 - protein, 15 aa, Bordetella pertussis
YGKRTENVQYRHVEL

SEQ ID NO: 1793 - protein, 15 aa, Bordetella pertussis
ENVQYRHVELARVGQ

SEQ ID NO: 1794 - protein, 15 aa, Bordetella pertussis
RHVELARVGQLVEVD

SEQ ID NO: 1795 - protein, 15 aa, Bordetella pertussis
ARVGQLVEVDTLEHV

SEQ ID NO: 1796 - protein, 15 aa, Bordetella pertussis
LVEVDTLEHVQHIIG

SEQ ID NO: 1797 - protein, 15 aa, Bordetella pertussis
TLEHVQHIIGGAGND

SEQ ID NO: 1798 - protein, 15 aa, Bordetella pertussis
QHIIGGAGNDSITGN

SEQ ID NO: 1799 - protein, 15 aa, Bordetella pertussis
GAGNDSITGNAHDNF

SEQ ID NO: 1800 - protein, 15 aa, Bordetella pertussis
SITGNAHDNFLAGGS

SEQ ID NO: 1801 - protein, 15 aa, Bordetella pertussis
AHDNFLAGGSGDDRL

SEQ ID NO: 1802 - protein, 15 aa, Bordetella pertussis
LAGGSGDDRLDGGAG

SEQ ID NO: 1803 - protein, 15 aa, Bordetella pertussis
GDDRLDGGAGNDTLV

SEQ ID NO: 1804 - protein, 15 aa, Bordetella pertussis
DGGAGNDTLVGGEGQ

SEQ ID NO: 1805 - protein, 15 aa, Bordetella pertussis
NDTLVGGEGQNTVIG

SEQ ID NO: 1806 - protein, 15 aa, Bordetella pertussis
GGEGQNTVIGGAGDD

SEQ ID NO: 1807 - protein, 15 aa, Bordetella pertussis
NTVIGGAGDDVFLQD

SEQ ID NO: 1808 - protein, 15 aa, Bordetella pertussis
GAGDDVFLQDLGVWS

SEQ ID NO: 1809 - protein, 15 aa, Bordetella pertussis
VFLQDLGVWSNQLDG

SEQ ID NO: 1810 - protein, 15 aa, Bordetella pertussis
LGVWSNQLDGGAGVD

SEQ ID NO: 1811 - protein, 15 aa, Bordetella pertussis
NQLDGGAGVDTVKYN

SEQ ID NO: 1812 - protein, 15 aa, Bordetella pertussis
GAGVDTVKYNVHQPS

SEQ ID NO: 1813 - protein, 15 aa, Bordetella pertussis
TVKYNVHQPSEERLE

SEQ ID NO: 1814 - protein, 15 aa, Bordetella pertussis
VHQPSEERLERMGDT

SEQ ID NO: 1815 - protein, 15 aa, Bordetella pertussis
EERLERMGDTGIHAD

SEQ ID NO: 1816 - protein, 15 aa, Bordetella pertussis
RMGDTGIHADLQKGT

SEQ ID NO: 1817 - protein, 15 aa, Bordetella pertussis
GIHADLQKGTVEKWP

SEQ ID NO: 1818 - protein, 15 aa, Bordetella pertussis
LQKGTVEKWPALNLF

SEQ ID NO: 1819 - protein, 15 aa, Bordetella pertussis
VEKWPALNLFSVDHV

SEQ ID NO: 1820 - protein, 15 aa, Bordetella pertussis
ALNLFSVDHVKNIEN

SEQ ID NO: 1821 - protein, 15 aa, Bordetella pertussis
SVDHVKNIENLHGSR

SEQ ID NO: 1822 - protein, 15 aa, Bordetella pertussis
KNIENLHGSRLNDRI

SEQ ID NO: 1823 - protein, 15 aa, Bordetella pertussis
LHGSRLNDRIAGDDQ

SEQ ID NO: 1824 - protein, 15 aa, Bordetella pertussis
LNDRIAGDDQDNELW

SEQ ID NO: 1825 - protein, 15 aa, Bordetella pertussis
AGDDQDNELWGHDGN

SEQ ID NO: 1826 - protein, 15 aa, Bordetella pertussis
DNELWGHDGNDTIRG

SEQ ID NO: 1827 - protein, 15 aa, Bordetella pertussis
GHDGNDTIRGRGGDD

SEQ ID NO: 1828 - protein, 15 aa, Bordetella pertussis
DTIRGRGGDDILRGG

SEQ ID NO: 1829 - protein, 15 aa, Bordetella pertussis
RGGDDILRGGLGLDT

SEQ ID NO: 1830 - protein, 15 aa, Bordetella pertussis
ILRGGLGLDTLYGED

SEQ ID NO: 1831 - protein, 15 aa, Bordetella pertussis
LGLDTLYGEDGNDIF

SEQ ID NO: 1832 - protein, 15 aa, Bordetella pertussis
LYGEDGNDIFLQDDE

SEQ ID NO: 1833 - protein, 15 aa, Bordetella pertussis
GNDIFLQDDETVSDD

SEQ ID NO: 1834 - protein, 15 aa, Bordetella pertussis
LQDDETVSDDIDGGA

SEQ ID NO: 1835 - protein, 15 aa, Bordetella pertussis
TVSDDIDGGAGLDTV

SEQ ID NO: 1836 - protein, 15 aa, Bordetella pertussis
IDGGAGLDTVDYSAM

SEQ ID NO: 1837 - protein, 15 aa, Bordetella pertussis
GLDTVDYSAMIHPGR

SEQ ID NO: 1838 - protein, 15 aa, Bordetella pertussis
DYSAMIHPGRIVAPH

SEQ ID NO: 1839 - protein, 15 aa, Bordetella pertussis
IHPGRIVAPHEYGFG

SEQ ID NO: 1840 - protein, 15 aa, Bordetella pertussis
IVAPHEYGFGIEADL

SEQ ID NO: 1841 - protein, 15 aa, Bordetella pertussis
EYGFGIEADLSREWV

SEQ ID NO: 1842 - protein, 15 aa, Bordetella pertussis
IEADLSREWVRKASA

SEQ ID NO: 1843 - protein, 15 aa, Bordetella pertussis
SREWVRKASALGVDY

SEQ ID NO: 1844 - protein, 15 aa, Bordetella pertussis
RKASALGVDYYDNVR

SEQ ID NO: 1845 - protein, 15 aa, Bordetella pertussis
LGVDYYDNVRNVENV

SEQ ID NO: 1846 - protein, 15 aa, Bordetella pertussis
YDNVRNVENVIGTSM

SEQ ID NO: 1847 - protein, 15 aa, Bordetella pertussis
NVENVIGTSMKDVLI

SEQ ID NO: 1848 - protein, 15 aa, Bordetella pertussis
IGTSMKDVLIGDAQA

SEQ ID NO: 1849 - protein, 15 aa, Bordetella pertussis
KDVLIGDAQANTLMG

SEQ ID NO: 1850 - protein, 15 aa, Bordetella pertussis
GDAQANTLMGQGGDD

SEQ ID NO: 1851 - protein, 15 aa, Bordetella pertussis
NTLMGQGGDDTVRGG

SEQ ID NO: 1852 - protein, 15 aa, Bordetella pertussis
QGGDDTVRGGDGDDL

SEQ ID NO: 1853 - protein, 15 aa, Bordetella pertussis
TVRGGDGDDLLFGGD

SEQ ID NO: 1854 - protein, 15 aa, Bordetella pertussis
DGDDLLFGGDGNDML

SEQ ID NO: 1855 - protein, 15 aa, Bordetella pertussis
LFGGDGNDMLYGDAG

SEQ ID NO: 1856 - protein, 15 aa, Bordetella pertussis
GNDMLYGDAGNDTLY

SEQ ID NO: 1857 - protein, 15 aa, Bordetella pertussis
YGDAGNDTLYGGLGD

SEQ ID NO: 1858 - protein, 15 aa, Bordetella pertussis
NDTLYGGLGDDTLEG

SEQ ID NO: 1859 - protein, 15 aa, Bordetella pertussis
GGLGDDTLEGGAGND

SEQ ID NO: 1860 - protein, 15 aa, Bordetella pertussis
DTLEGGAGNDWFGQT

SEQ ID NO: 1861 - protein, 15 aa, Bordetella pertussis
GAGNDWFGQTQAREH

SEQ ID NO: 1862 - protein, 15 aa, Bordetella pertussis
WFGQTQAREHDVLRG

SEQ ID NO: 1863 - protein, 15 aa, Bordetella pertussis
QAREHDVLRGGDGVD

SEQ ID NO: 1864 - protein, 15 aa, Bordetella pertussis
DVLRGGDGVDTVDYS

SEQ ID NO: 1865 - protein, 15 aa, Bordetella pertussis
GDGVDTVDYSQTGAH

SEQ ID NO: 1866 - protein, 15 aa, Bordetella pertussis
TVDYSQTGAHAGIAA

SEQ ID NO: 1867 - protein, 15 aa, Bordetella pertussis
QTGAHAGIAAGRIGL

SEQ ID NO: 1868 - protein, 15 aa, Bordetella pertussis
AGIAAGRIGLGILAD

SEQ ID NO: 1869 - protein, 15 aa, Bordetella pertussis
GRIGLGILADLGAGR

SEQ ID NO: 1870 - protein, 15 aa, Bordetella pertussis
GILADLGAGRVDKLG

SEQ ID NO: 1871 - protein, 15 aa, Bordetella pertussis
LGAGRVDKLGEAGSS

SEQ ID NO: 1872 - protein, 15 aa, Bordetella pertussis
VDKLGEAGSSAYDTV

SEQ ID NO: 1873 - protein, 15 aa, Bordetella pertussis
EAGSSAYDTVSGIEN

SEQ ID NO: 1874 - protein, 15 aa, Bordetella pertussis
AYDTVSGIENVVGTE

SEQ ID NO: 1875 - protein, 15 aa, Bordetella pertussis
SGIENVVGTELADRI

SEQ ID NO: 1876 - protein, 15 aa, Bordetella pertussis
VVGTELADRITGDAQ

SEQ ID NO: 1877 - protein, 15 aa, Bordetella pertussis
LADRITGDAQANVLR

SEQ ID NO: 1878 - protein, 15 aa, Bordetella pertussis
TGDAQANVLRGAGGA

SEQ ID NO: 1879 - protein, 15 aa, Bordetella pertussis
ANVLRGAGGADVLAG

SEQ ID NO: 1880 - protein, 15 aa, Bordetella pertussis
GAGGADVLAGGEGDD

SEQ ID NO: 1881 - protein, 15 aa, Bordetella pertussis
DVLAGGEGDDVLLGG

SEQ ID NO: 1882 - protein, 15 aa, Bordetella pertussis
GEGDDVLLGGDGDDQ

SEQ ID NO: 1883 - protein, 15 aa, Bordetella pertussis
VLLGGDGDDQLSGDA

SEQ ID NO: 1884 - protein, 15 aa, Bordetella pertussis
DGDDQLSGDAGRDRL

SEQ ID NO: 1885 - protein, 15 aa, Bordetella pertussis
LSGDAGRDRLYGEAG

SEQ ID NO: 1886 - protein, 15 aa, Bordetella pertussis
GRDRLYGEAGDDWFF

SEQ ID NO: 1887 - protein, 15 aa, Bordetella pertussis
YGEAGDDWFFQDAAN

SEQ ID NO: 1888 - protein, 15 aa, Bordetella pertussis
DDWFFQDAANAGNLL

SEQ ID NO: 1889 - protein, 15 aa, Bordetella pertussis
QDAANAGNLLDGGDG

SEQ ID NO: 1890 - protein, 15 aa, Bordetella pertussis
AGNLLDGGDGRDTVD

SEQ ID NO: 1891 - protein, 15 aa, Bordetella pertussis
DGGDGRDTVDFSGPG

SEQ ID NO: 1892 - protein, 15 aa, Bordetella pertussis
RDTVDFSGPGRGLDA

SEQ ID NO: 1893 - protein, 15 aa, Bordetella pertussis
FSGPGRGLDAGAKGV

SEQ ID NO: 1894 - protein, 15 aa, Bordetella pertussis
RGLDAGAKGVFLSLG

SEQ ID NO: 1895 - protein, 15 aa, Bordetella pertussis
GAKGVFLSLGKGFAS

SEQ ID NO: 1896 - protein, 15 aa, Bordetella pertussis
FLSLGKGFASLMDEP

SEQ ID NO: 1897 - protein, 15 aa, Bordetella pertussis
KGFASLMDEPETSNV

SEQ ID NO: 1898 - protein, 15 aa, Bordetella pertussis
LMDEPETSNVLRNIE

SEQ ID NO: 1899 - protein, 15 aa, Bordetella pertussis
ETSNVLRNIENAVGS

SEQ ID NO: 1900 - protein, 15 aa, Bordetella pertussis
LRNIENAVGSARDDV

SEQ ID NO: 1901 - protein, 15 aa, Bordetella pertussis
NAVGSARDDVLIGDA

SEQ ID NO: 1902 - protein, 15 aa, Bordetella pertussis
ARDDVLIGDAGANVL

SEQ ID NO: 1903 - protein, 15 aa, Bordetella pertussis
LIGDAGANVLNGLAG

SEQ ID NO: 1904 - protein, 15 aa, Bordetella pertussis
GANVLNGLAGNDVLS

SEQ ID NO: 1905 - protein, 15 aa, Bordetella pertussis
NGLAGNDVLSGGAGD

SEQ ID NO: 1906 - protein, 15 aa, Bordetella pertussis
NDVLSGGAGDDVLLG

SEQ ID NO: 1907 - protein, 15 aa, Bordetella pertussis
GGAGDDVLLGDEGSD

SEQ ID NO: 1908 - protein, 15 aa, Bordetella pertussis
DVLLGDEGSDLLSGD

SEQ ID NO: 1909 - protein, 15 aa, Bordetella pertussis
DEGSDLLSGDAGNDD

SEQ ID NO: 1910 - protein, 15 aa, Bordetella pertussis
LLSGDAGNDDLFGGQ

SEQ ID NO: 1911 - protein, 15 aa, Bordetella pertussis
AGNDDLFGGQGDDTY

SEQ ID NO: 1912 - protein, 15 aa, Bordetella pertussis
LFGGQGDDTYLFGVG

SEQ ID NO: 1913 - protein, 15 aa, Bordetella pertussis
GDDTYLFGVGYGHDT

SEQ ID NO: 1914 - protein, 15 aa, Bordetella pertussis
LFGVGYGHDTIYESG

SEQ ID NO: 1915 - protein, 15 aa, Bordetella pertussis
YGHDTIYESGGGHDT

SEQ ID NO: 1916 - protein, 15 aa, Bordetella pertussis
IYESGGGHDTIRINA

SEQ ID NO: 1917 - protein, 15 aa, Bordetella pertussis
GGHDTIRINAGADQL

SEQ ID NO: 1918 - protein, 15 aa, Bordetella pertussis
IRINAGADQLWFARQ

SEQ ID NO: 1919 - protein, 15 aa, Bordetella pertussis
GADQLWFARQGNDLE

SEQ ID NO: 1920 - protein, 15 aa, Bordetella pertussis
WFARQGNDLEIRILG

SEQ ID NO: 1921 - protein, 15 aa, Bordetella pertussis
GNDLEIRILGTDDAL

SEQ ID NO: 1922 - protein, 15 aa, Bordetella pertussis
IRILGTDDALTVHDW

SEQ ID NO: 1923 - protein, 15 aa, Bordetella pertussis
TDDALTVHDWYRDAD

SEQ ID NO: 1924 - protein, 15 aa, Bordetella pertussis
TVHDWYRDADHRVEI

SEQ ID NO: 1925 - protein, 15 aa, Bordetella pertussis
YRDADHRVEIIHAAN

SEQ ID NO: 1926 - protein, 15 aa, Bordetella pertussis
HRVEIIHAANQAVDQ

SEQ ID NO: 1927 - protein, 15 aa, Bordetella pertussis
IHAANQAVDQAGIEK

SEQ ID NO: 1928 - protein, 15 aa, Bordetella pertussis
QAVDQAGIEKLVEAM

SEQ ID NO: 1929 - protein, 15 aa, Bordetella pertussis
AGIEKLVEAMAQYPD

SEQ ID NO: 1930 - protein, 15 aa, Bordetella pertussis
LVEAMAQYPDPGAAA

SEQ ID NO: 1931 - protein, 15 aa, Bordetella pertussis
AQYPDPGAAAAAPPA

SEQ ID NO: 1932 - protein, 15 aa, Bordetella pertussis
PGAAAAAPPAARVPD

SEQ ID NO: 1933 - protein, 15 aa, Bordetella pertussis
AAPPAARVPDTLMQS

SEQ ID NO: 1934 - protein, 15 aa, Bordetella pertussis
ARVPDTLMQSLAVNW

SEQ ID NO: 1935 - protein, 15 aa, Bordetella pertussis
RVPDTLMQSLAVNWR

SEQ ID NO: 1936 - protein, 15 aa, Bordetella pertussis
MRLPRQIRLPHLRDI

SEQ ID NO: 1937 - protein, 15 aa, Bordetella pertussis
QIRLPHLRDIGALLT

SEQ ID NO: 1938 - protein, 15 aa, Bordetella pertussis
HLRDIGALLTDSARE

SEQ ID NO: 1939 - protein, 15 aa, Bordetella pertussis
GALLTDSAREWSRHR

SEQ ID NO: 1940 - protein, 15 aa, Bordetella pertussis
DSAREWSRHRASSKG

SEQ ID NO: 1941 - protein, 15 aa, Bordetella pertussis
WSRHRASSKGAALSL

SEQ ID NO: 1942 - protein, 15 aa, Bordetella pertussis
ASSKGAALSLYMVFS

SEQ ID NO: 1943 - protein, 15 aa, Bordetella pertussis
AALSLYMVFSLAPML

SEQ ID NO: 1944 - protein, 15 aa, Bordetella pertussis
YMVFSLAPMLILVIA

SEQ ID NO: 1945 - protein, 15 aa, Bordetella pertussis
LAPMLILVIAVAGAF

SEQ ID NO: 1946 - protein, 15 aa, Bordetella pertussis
ILVIAVAGAFFGEEA

SEQ ID NO: 1947 - protein, 15 aa, Bordetella pertussis
VAGAFFGEEAVRSEL

SEQ ID NO: 1948 - protein, 15 aa, Bordetella pertussis
FGEEAVRSELFSQVR

SEQ ID NO: 1949 - protein, 15 aa, Bordetella pertussis
VRSELFSQVRDLTGE

SEQ ID NO: 1950 - protein, 15 aa, Bordetella pertussis
FSQVRDLTGERGAEV

SEQ ID NO: 1951 - protein, 15 aa, Bordetella pertussis
DLTGERGAEVIQTVL

SEQ ID NO: 1952 - protein, 15 aa, Bordetella pertussis
RGAEVIQTVLASAHE

SEQ ID NO: 1953 - protein, 15 aa, Bordetella pertussis
IQTVLASAHESGSGW

SEQ ID NO: 1954 - protein, 15 aa, Bordetella pertussis
ASAHESGSGWLAALL

SEQ ID NO: 1955 - protein, 15 aa, Bordetella pertussis
SGSGWLAALLSICVL

SEQ ID NO: 1956 - protein, 15 aa, Bordetella pertussis
LAALLSICVLVFSAT

SEQ ID NO: 1957 - protein, 15 aa, Bordetella pertussis
SICVLVFSATTAFAE

SEQ ID NO: 1958 - protein, 15 aa, Bordetella pertussis
VFSATTAFAELKASL

SEQ ID NO: 1959 - protein, 15 aa, Bordetella pertussis
TAFAELKASLDELWD

SEQ ID NO: 1960 - protein, 15 aa, Bordetella pertussis
LKASLDELWDVKEDK

SEQ ID NO: 1961 - protein, 15 aa, Bordetella pertussis
DELWDVKEDKSGLQG

SEQ ID NO: 1962 - protein, 15 aa, Bordetella pertussis
VKEDKSGLQGLVRSR

SEQ ID NO: 1963 - protein, 15 aa, Bordetella pertussis
SGLQGLVRSRMLSFG

SEQ ID NO: 1964 - protein, 15 aa, Bordetella pertussis
LVRSRMLSFGLVLVL

SEQ ID NO: 1965 - protein, 15 aa, Bordetella pertussis
MLSFGLVLVLALFLL

SEQ ID NO: 1966 - protein, 15 aa, Bordetella pertussis
LVLVLALFLLLSLTL

SEQ ID NO: 1967 - protein, 15 aa, Bordetella pertussis
ALFLLLSLTLNAALG

SEQ ID NO: 1968 - protein, 15 aa, Bordetella pertussis
LSLTLNAALGAAKGY

SEQ ID NO: 1969 - protein, 15 aa, Bordetella pertussis
NAALGAAKGYYGDLW

SEQ ID NO: 1970 - protein, 15 aa, Bordetella pertussis
AAKGYYGDLWSTSAF

SEQ ID NO: 1971 - protein, 15 aa, Bordetella pertussis
YGDLWSTSAFAMAAD

SEQ ID NO: 1972 - protein, 15 aa, Bordetella pertussis
STSAFAMAADWLSNL

SEQ ID NO: 1973 - protein, 15 aa, Bordetella pertussis
AMAADWLSNLFSFAV

SEQ ID NO: 1974 - protein, 15 aa, Bordetella pertussis
WLSNLFSFAVVTALF

SEQ ID NO: 1975 - protein, 15 aa, Bordetella pertussis
FSFAVVTALFAVVYK

SEQ ID NO: 1976 - protein, 15 aa, Bordetella pertussis
VTALFAVVYKLLPSK

SEQ ID NO: 1977 - protein, 15 aa, Bordetella pertussis
AVVYKLLPSKRIPWL

SEQ ID NO: 1978 - protein, 15 aa, Bordetella pertussis
LLPSKRIPWLDVIPG

SEQ ID NO: 1979 - protein, 15 aa, Bordetella pertussis
RIPWLDVIPGAIVTA

SEQ ID NO: 1980 - protein, 15 aa, Bordetella pertussis
DVIPGAIVTAALFLA

SEQ ID NO: 1981 - protein, 15 aa, Bordetella pertussis
AIVTAALFLAGKWGI

SEQ ID NO: 1982 - protein, 15 aa, Bordetella pertussis
ALFLAGKWGIGLYLG

SEQ ID NO: 1983 - protein, 15 aa, Bordetella pertussis
GKWGIGLYLGRGAAV

SEQ ID NO: 1984 - protein, 15 aa, Bordetella pertussis
GLYLGRGAAVSAYGA

SEQ ID NO: 1985 - protein, 15 aa, Bordetella pertussis
RGAAVSAYGAAGSLI

SEQ ID NO: 1986 - protein, 15 aa, Bordetella pertussis
SAYGAAGSLIALLLW

SEQ ID NO: 1987 - protein, 15 aa, Bordetella pertussis
AGSLIALLLWIYYSA

SEQ ID NO: 1988 - protein, 15 aa, Bordetella pertussis
ALLLWIYYSAQIFFF

SEQ ID NO: 1989 - protein, 15 aa, Bordetella pertussis
IYYSAQIFFFGAVFT

SEQ ID NO: 1990 - protein, 15 aa, Bordetella pertussis
QIFFFGAVFTRQFAE

SEQ ID NO: 1991 - protein, 15 aa, Bordetella pertussis
GAVFTRQFAERFGSL

SEQ ID NO: 1992 - protein, 15 aa, Bordetella pertussis
RQFAERFGSLRRAAP

SEQ ID NO: 1993 - protein, 15 aa, Bordetella pertussis
QFAERFGSLRRAAPA

SEQ ID NO: 1994 - protein, 15 aa, Bordetella pertussis
MKNESSTTTADLEQL

SEQ ID NO: 1995 - protein, 15 aa, Bordetella pertussis
STTTADLEQLVAEAD

SEQ ID NO: 1996 - protein, 15 aa, Bordetella pertussis
DLEQLVAEADRGGRH

SEQ ID NO: 1997 - protein, 15 aa, Bordetella pertussis
VAEADRGGRHAGGVA

SEQ ID NO: 1998 - protein, 15 aa, Bordetella pertussis
RGGRHAGGVAGATLA

SEQ ID NO: 1999 - protein, 15 aa, Bordetella pertussis
AGGVAGATLAAGALV

SEQ ID NO: 2000 - protein, 15 aa, Bordetella pertussis
GATLAAGALVWSLFQ

SEQ ID NO: 2001 - protein, 15 aa, Bordetella pertussis
AGALVWSLFQLWYAS

SEQ ID NO: 2002 - protein, 15 aa, Bordetella pertussis
WSLFQLWYASPLPFS

SEQ ID NO: 2003 - protein, 15 aa, Bordetella pertussis
LWYASPLPFSLHWGV

SEQ ID NO: 2004 - protein, 15 aa, Bordetella pertussis
PLPFSLHWGVFNDTE

SEQ ID NO: 2005 - protein, 15 aa, Bordetella pertussis
LHWGVFNDTEARALH

SEQ ID NO: 2006 - protein, 15 aa, Bordetella pertussis
FNDTEARALHLGTAM

SEQ ID NO: 2007 - protein, 15 aa, Bordetella pertussis
ARALHLGTAMFLGYL

SEQ ID NO: 2008 - protein, 15 aa, Bordetella pertussis
LGTAMFLGYLAYPAT

SEQ ID NO: 2009 - protein, 15 aa, Bordetella pertussis
FLGYLAYPATKRSAR

SEQ ID NO: 2010 - protein, 15 aa, Bordetella pertussis
AYPATKRSARDRMPW

SEQ ID NO: 2011 - protein, 15 aa, Bordetella pertussis
KRSARDRMPWYDWVL

SEQ ID NO: 2012 - protein, 15 aa, Bordetella pertussis
DRMPWYDWVLALAAG

SEQ ID NO: 2013 - protein, 15 aa, Bordetella pertussis
YDWVLALAAGFCGAY

SEQ ID NO: 2014 - protein, 15 aa, Bordetella pertussis
ALAAGFCGAYLYLFY

SEQ ID NO: 2015 - protein, 15 aa, Bordetella pertussis
FCGAYLYLFYNELAI

SEQ ID NO: 2016 - protein, 15 aa, Bordetella pertussis
LYLFYNELAIRPGQP

SEQ ID NO: 2017 - protein, 15 aa, Bordetella pertussis
NELAIRPGQPTSMDV

SEQ ID NO: 2018 - protein, 15 aa, Bordetella pertussis
RPGQPTSMDVATAVA

SEQ ID NO: 2019 - protein, 15 aa, Bordetella pertussis
TSMDVATAVAGLLLL

SEQ ID NO: 2020 - protein, 15 aa, Bordetella pertussis
ATAVAGLLLLLEVTR

SEQ ID NO: 2021 - protein, 15 aa, Bordetella pertussis
GLLLLLEVTRRALGL

SEQ ID NO: 2022 - protein, 15 aa, Bordetella pertussis
LEVTRRALGLPMTVL

SEQ ID NO: 2023 - protein, 15 aa, Bordetella pertussis
RALGLPMTVLGAVFV

SEQ ID NO: 2024 - protein, 15 aa, Bordetella pertussis
PMTVLGAVFVLYALA

SEQ ID NO: 2025 - protein, 15 aa, Bordetella pertussis
GAVFVLYALAGPWLP

SEQ ID NO: 2026 - protein, 15 aa, Bordetella pertussis
LYALAGPWLPDVLAH

SEQ ID NO: 2027 - protein, 15 aa, Bordetella pertussis
GPWLPDVLAHRGASI

SEQ ID NO: 2028 - protein, 15 aa, Bordetella pertussis
DVLAHRGASIERLMS

SEQ ID NO: 2029 - protein, 15 aa, Bordetella pertussis
RGASIERLMSHMWLT

SEQ ID NO: 2030 - protein, 15 aa, Bordetella pertussis
ERLMSHMWLTTEGVY

SEQ ID NO: 2031 - protein, 15 aa, Bordetella pertussis
HMWLTTEGVYGVALG

SEQ ID NO: 2032 - protein, 15 aa, Bordetella pertussis
TEGVYGVALGVSVSY

SEQ ID NO: 2033 - protein, 15 aa, Bordetella pertussis
GVALGVSVSYIFIFV

SEQ ID NO: 2034 - protein, 15 aa, Bordetella pertussis
VSVSYIFIFVLLGSL

SEQ ID NO: 2035 - protein, 15 aa, Bordetella pertussis
IFIFVLLGSLLDKCG

SEQ ID NO: 2036 - protein, 15 aa, Bordetella pertussis
LLGSLLDKCGAGNYM

SEQ ID NO: 2037 - protein, 15 aa, Bordetella pertussis
LDKCGAGNYMMQVSF

SEQ ID NO: 2038 - protein, 15 aa, Bordetella pertussis
AGNYMMQVSFALLGH

SEQ ID NO: 2039 - protein, 15 aa, Bordetella pertussis
MQVSFALLGHLRGGP

SEQ ID NO: 2040 - protein, 15 aa, Bordetella pertussis
ALLGHLRGGPAKVAV

SEQ ID NO: 2041 - protein, 15 aa, Bordetella pertussis
LRGGPAKVAVVSSAV

SEQ ID NO: 2042 - protein, 15 aa, Bordetella pertussis
AKVAVVSSAVNGLVS

SEQ ID NO: 2043 - protein, 15 aa, Bordetella pertussis
VSSAVNGLVSASSVA

SEQ ID NO: 2044 - protein, 15 aa, Bordetella pertussis
NGLVSASSVANVVTG

SEQ ID NO: 2045 - protein, 15 aa, Bordetella pertussis
ASSVANVVTGGIFTI

SEQ ID NO: 2046 - protein, 15 aa, Bordetella pertussis
NVVTGGIFTIPLMKK

SEQ ID NO: 2047 - protein, 15 aa, Bordetella pertussis
GIFTIPLMKKAGYGG

SEQ ID NO: 2048 - protein, 15 aa, Bordetella pertussis
PLMKKAGYGGVRAGA

SEQ ID NO: 2049 - protein, 15 aa, Bordetella pertussis
AGYGGVRAGAIETAS

SEQ ID NO: 2050 - protein, 15 aa, Bordetella pertussis
VRAGAIETASSVNGQ

SEQ ID NO: 2051 - protein, 15 aa, Bordetella pertussis
IETASSVNGQIMPPV

SEQ ID NO: 2052 - protein, 15 aa, Bordetella pertussis
SVNGQIMPPVMGAAA

SEQ ID NO: 2053 - protein, 15 aa, Bordetella pertussis
IMPPVMGAAAFLMIE

SEQ ID NO: 2054 - protein, 15 aa, Bordetella pertussis
MGAAAFLMIEYVGIP

SEQ ID NO: 2055 - protein, 15 aa, Bordetella pertussis
FLMIEYVGIPYTDII

SEQ ID NO: 2056 - protein, 15 aa, Bordetella pertussis
YVGIPYTDIIRHAIL

SEQ ID NO: 2057 - protein, 15 aa, Bordetella pertussis
YTDIIRHAILPASIS

SEQ ID NO: 2058 - protein, 15 aa, Bordetella pertussis
RHAILPASISYIALF

SEQ ID NO: 2059 - protein, 15 aa, Bordetella pertussis
PASISYIALFYSVHL

SEQ ID NO: 2060 - protein, 15 aa, Bordetella pertussis
YIALFYSVHLEALKL

SEQ ID NO: 2061 - protein, 15 aa, Bordetella pertussis
YSVHLEALKLGIEPM

SEQ ID NO: 2062 - protein, 15 aa, Bordetella pertussis
EALKLGIEPMMAAGK

SEQ ID NO: 2063 - protein, 15 aa, Bordetella pertussis
GIEPMMAAGKPRTPL

SEQ ID NO: 2064 - protein, 15 aa, Bordetella pertussis
MAAGKPRTPLQKLAG

SEQ ID NO: 2065 - protein, 15 aa, Bordetella pertussis
PRTPLQKLAGWGMGI

SEQ ID NO: 2066 - protein, 15 aa, Bordetella pertussis
QKLAGWGMGISGTLI

SEQ ID NO: 2067 - protein, 15 aa, Bordetella pertussis
WGMGISGTLIAMGLV

SEQ ID NO: 2068 - protein, 15 aa, Bordetella pertussis
SGTLIAMGLVYWIGV

SEQ ID NO: 2069 - protein, 15 aa, Bordetella pertussis
AMGLVYWIGVGVQAV

SEQ ID NO: 2070 - protein, 15 aa, Bordetella pertussis
YWIGVGVQAVAGAAA

SEQ ID NO: 2071 - protein, 15 aa, Bordetella pertussis
GVQAVAGAAAIWILL

SEQ ID NO: 2072 - protein, 15 aa, Bordetella pertussis
AGAAAIWILLAMLVA

SEQ ID NO: 2073 - protein, 15 aa, Bordetella pertussis
IWILLAMLVALNIWL

SEQ ID NO: 2074 - protein, 15 aa, Bordetella pertussis
AMLVALNIWLLRVAA

SEQ ID NO: 2075 - protein, 15 aa, Bordetella pertussis
LNIWLLRVAARHPDL

SEQ ID NO: 2076 - protein, 15 aa, Bordetella pertussis
LRVAARHPDLPTEID

SEQ ID NO: 2077 - protein, 15 aa, Bordetella pertussis
RHPDLPTEIDVNHPV

SEQ ID NO: 2078 - protein, 15 aa, Bordetella pertussis
PTEIDVNHPVRPEPW

SEQ ID NO: 2079 - protein, 15 aa, Bordetella pertussis
VNHPVRPEPWPTVRA

SEQ ID NO: 2080 - protein, 15 aa, Bordetella pertussis
RPEPWPTVRAGLHFL

SEQ ID NO: 2081 - protein, 15 aa, Bordetella pertussis
PTVRAGLHFLIPIGI

SEQ ID NO: 2082 - protein, 15 aa, Bordetella pertussis
GLHFLIPIGILVWCL

SEQ ID NO: 2083 - protein, 15 aa, Bordetella pertussis
IPIGILVWCLSVEEL

SEQ ID NO: 2084 - protein, 15 aa, Bordetella pertussis
LVWCLSVEELSAGLS

SEQ ID NO: 2085 - protein, 15 aa, Bordetella pertussis
SVEELSAGLSAFWAA

SEQ ID NO: 2086 - protein, 15 aa, Bordetella pertussis
SAGLSAFWAAAATLL

SEQ ID NO: 2087 - protein, 15 aa, Bordetella pertussis
AFWAAAATLLQMVTQ

SEQ ID NO: 2088 - protein, 15 aa, Bordetella pertussis
AATLLQMVTQRPLTA

SEQ ID NO: 2089 - protein, 15 aa, Bordetella pertussis
QMVTQRPLTAWFRGQ

SEQ ID NO: 2090 - protein, 15 aa, Bordetella pertussis
RPLTAWFRGQAIAPA

SEQ ID NO: 2091 - protein, 15 aa, Bordetella pertussis
WFRGQAIAPAALLGW

SEQ ID NO: 2092 - protein, 15 aa, Bordetella pertussis
AIAPAALLGWRDAIG

SEQ ID NO: 2093 - protein, 15 aa, Bordetella pertussis
ALLGWRDAIGGLQDD

SEQ ID NO: 2094 - protein, 15 aa, Bordetella pertussis
RDAIGGLQDDARNMI

SEQ ID NO: 2095 - protein, 15 aa, Bordetella pertussis
GLQDDARNMIGIAIA

SEQ ID NO: 2096 - protein, 15 aa, Bordetella pertussis
ARNMIGIAIACGTAG

SEQ ID NO: 2097 - protein, 15 aa, Bordetella pertussis
GIAIACGTAGLIVGA

SEQ ID NO: 2098 - protein, 15 aa, Bordetella pertussis
CGTAGLIVGAITLTG

SEQ ID NO: 2099 - protein, 15 aa, Bordetella pertussis
LIVGAITLTGLGLRM

SEQ ID NO: 2100 - protein, 15 aa, Bordetella pertussis
ITLTGLGLRMTAFVE

SEQ ID NO: 2101 - protein, 15 aa, Bordetella pertussis
LGLRMTAFVELVSMG

SEQ ID NO: 2102 - protein, 15 aa, Bordetella pertussis
TAFVELVSMGNVLLM

SEQ ID NO: 2103 - protein, 15 aa, Bordetella pertussis
LVSMGNVLLMLIFTA

SEQ ID NO: 2104 - protein, 15 aa, Bordetella pertussis
NVLLMLIFTAIVCLI

SEQ ID NO: 2105 - protein, 15 aa, Bordetella pertussis
LIFTAIVCLILGLGM

SEQ ID NO: 2106 - protein, 15 aa, Bordetella pertussis
IVCLILGLGMPTTAN

SEQ ID NO: 2107 - protein, 15 aa, Bordetella pertussis
LGLGMPTTANYILMA

SEQ ID NO: 2108 - protein, 15 aa, Bordetella pertussis
PTTANYILMATLMAP

SEQ ID NO: 2109 - protein, 15 aa, Bordetella pertussis
YILMATLMAPVVVEL

SEQ ID NO: 2110 - protein, 15 aa, Bordetella pertussis
TLMAPVVVELGAQNG

SEQ ID NO: 2111 - protein, 15 aa, Bordetella pertussis
VVVELGAQNGLIIPL

SEQ ID NO: 2112 - protein, 15 aa, Bordetella pertussis
GAQNGLIIPLIAVHM

SEQ ID NO: 2113 - protein, 15 aa, Bordetella pertussis
LIIPLIAVHMFVFYY

SEQ ID NO: 2114 - protein, 15 aa, Bordetella pertussis
IAVHMFVFYYGIMAD

SEQ ID NO: 2115 - protein, 15 aa, Bordetella pertussis
FVFYYGIMADITPPV

SEQ ID NO: 2116 - protein, 15 aa, Bordetella pertussis
GIMADITPPVGLATF

SEQ ID NO: 2117 - protein, 15 aa, Bordetella pertussis
ITPPVGLATFAAAAI

SEQ ID NO: 2118 - protein, 15 aa, Bordetella pertussis
GLATFAAAAISGADP

SEQ ID NO: 2119 - protein, 15 aa, Bordetella pertussis
AAAAISGADPIKTGV

SEQ ID NO: 2120 - protein, 15 aa, Bordetella pertussis
SGADPIKTGVQGVTY

SEQ ID NO: 2121 - protein, 15 aa, Bordetella pertussis
IKTGVQGVTYALRTA

SEQ ID NO: 2122 - protein, 15 aa, Bordetella pertussis
QGVTYALRTAVLPFM

SEQ ID NO: 2123 - protein, 15 aa, Bordetella pertussis
ALRTAVLPFMFVFNP

SEQ ID NO: 2124 - protein, 15 aa, Bordetella pertussis
VLPFMFVFNPLLLLI

SEQ ID NO: 2125 - protein, 15 aa, Bordetella pertussis
FVFNPLLLLIDVNSW

SEQ ID NO: 2126 - protein, 15 aa, Bordetella pertussis
LLLLIDVNSWTELIL

SEQ ID NO: 2127 - protein, 15 aa, Bordetella pertussis
DVNSWTELILVAGSA

SEQ ID NO: 2128 - protein, 15 aa, Bordetella pertussis
TELILVAGSATLASL

SEQ ID NO: 2129 - protein, 15 aa, Bordetella pertussis
VAGSATLASLTFASA

SEQ ID NO: 2130 - protein, 15 aa, Bordetella pertussis
TLASLTFASATLGWF

SEQ ID NO: 2131 - protein, 15 aa, Bordetella pertussis
TFASATLGWFRVRCT

SEQ ID NO: 2132 - protein, 15 aa, Bordetella pertussis
TLGWFRVRCTMLEIV

SEQ ID NO: 2133 - protein, 15 aa, Bordetella pertussis
RVRCTMLEIVVLLAV

SEQ ID NO: 2134 - protein, 15 aa, Bordetella pertussis
MLEIVVLLAVTFMLF

SEQ ID NO: 2135 - protein, 15 aa, Bordetella pertussis
VLLAVTFMLFRPDWL

SEQ ID NO: 2136 - protein, 15 aa, Bordetella pertussis
TFMLFRPDWLLDQVS

SEQ ID NO: 2137 - protein, 15 aa, Bordetella pertussis
RPDWLLDQVSERYQA

SEQ ID NO: 2138 - protein, 15 aa, Bordetella pertussis
LDQVSERYQARPAAE

SEQ ID NO: 2139 - protein, 15 aa, Bordetella pertussis
ERYQARPAAEVVQTA

SEQ ID NO: 2140 - protein, 15 aa, Bordetella pertussis
RPAAEVVQTAAALPH

SEQ ID NO: 2141 - protein, 15 aa, Bordetella pertussis
VVQTAAALPHNGRLV

SEQ ID NO: 2142 - protein, 15 aa, Bordetella pertussis
AALPHNGRLVAVLRG

SEQ ID NO: 2143 - protein, 15 aa, Bordetella pertussis
NGRLVAVLRGINLEG

SEQ ID NO: 2144 - protein, 15 aa, Bordetella pertussis
AVLRGINLEGDELTK

SEQ ID NO: 2145 - protein, 15 aa, Bordetella pertussis
INLEGDELTKTVAVA

SEQ ID NO: 2146 - protein, 15 aa, Bordetella pertussis
DELTKTVAVALPALD

SEQ ID NO: 2147 - protein, 15 aa, Bordetella pertussis
TVAVALPALDEGETL

SEQ ID NO: 2148 - protein, 15 aa, Bordetella pertussis
LPALDEGETLQGEAA

SEQ ID NO: 2149 - protein, 15 aa, Bordetella pertussis
EGETLQGEAAGRKRL

SEQ ID NO: 2150 - protein, 15 aa, Bordetella pertussis
QGEAAGRKRLTDAGL

SEQ ID NO: 2151 - protein, 15 aa, Bordetella pertussis
GRKRLTDAGLTIVAL

SEQ ID NO: 2152 - protein, 15 aa, Bordetella pertussis
TDAGLTIVALGDQVQ

SEQ ID NO: 2153 - protein, 15 aa, Bordetella pertussis
TIVALGDQVQIGGVR

SEQ ID NO: 2154 - protein, 15 aa, Bordetella pertussis
GDQVQIGGVRFGSTA

SEQ ID NO: 2155 - protein, 15 aa, Bordetella pertussis
IGGVRFGSTARRAGW

SEQ ID NO: 2156 - protein, 15 aa, Bordetella pertussis
FGSTARRAGWEQGWD

SEQ ID NO: 2157 - protein, 15 aa, Bordetella pertussis
RRAGWEQGWDVLELR

SEQ ID NO: 2158 - protein, 15 aa, Bordetella pertussis
EQGWDVLELRVPNPA

SEQ ID NO: 2159 - protein, 15 aa, Bordetella pertussis
VLELRVPNPARPAEF

SEQ ID NO: 2160 - protein, 15 aa, Bordetella pertussis
VPNPARPAEFWAYLP

SEQ ID NO: 2161 - protein, 15 aa, Bordetella pertussis
RPAEFWAYLPGLVLL

SEQ ID NO: 2162 - protein, 15 aa, Bordetella pertussis
WAYLPGLVLLALVWF

SEQ ID NO: 2163 - protein, 15 aa, Bordetella pertussis
GLVLLALVWFAQGRR

SEQ ID NO: 2164 - protein, 15 aa, Bordetella pertussis
ALVWFAQGRRQRAAA

SEQ ID NO: 2165 - protein, 15 aa, Bordetella pertussis
LVWFAQGRRQRAAAR

SEQ ID NO: 2166 - protein, 15 aa, Bordetella pertussis
MTDATNRFRPGLVGR

SEQ ID NO: 2167 - protein, 15 aa, Bordetella pertussis
NRFRPGLVGRALVRA

SEQ ID NO: 2168 - protein, 15 aa, Bordetella pertussis
GLVGRALVRAGLLFA

SEQ ID NO: 2169 - protein, 15 aa, Bordetella pertussis
ALVRAGLLFAVAACA

SEQ ID NO: 2170 - protein, 15 aa, Bordetella pertussis
GLLFAVAACAQAQLL

SEQ ID NO: 2171 - protein, 15 aa, Bordetella pertussis
VAACAQAQLLPGARD

SEQ ID NO: 2172 - protein, 15 aa, Bordetella pertussis
QAQLLPGARDLNRID

SEQ ID NO: 2173 - protein, 15 aa, Bordetella pertussis
PGARDLNRIDDRQRK

SEQ ID NO: 2174 - protein, 15 aa, Bordetella pertussis
LNRIDDRQRKEQLQR

SEQ ID NO: 2175 - protein, 15 aa, Bordetella pertussis
DRQRKEQLQRDIERA

SEQ ID NO: 2176 - protein, 15 aa, Bordetella pertussis
EQLQRDIERALTRPP

SEQ ID NO: 2177 - protein, 15 aa, Bordetella pertussis
DIERALTRPPVELNP

SEQ ID NO: 2178 - protein, 15 aa, Bordetella pertussis
LTRPPVELNPQSEAA

SEQ ID NO: 2179 - protein, 15 aa, Bordetella pertussis
VELNPQSEAAAPARK

SEQ ID NO: 2180 - protein, 15 aa, Bordetella pertussis
QSEAAAPARKPDATS

SEQ ID NO: 2181 - protein, 15 aa, Bordetella pertussis
APARKPDATSGHTVT

SEQ ID NO: 2182 - protein, 15 aa, Bordetella pertussis
PDATSGHTVTVHAVD

SEQ ID NO: 2183 - protein, 15 aa, Bordetella pertussis
GHTVTVHAVDLDFGV

SEQ ID NO: 2184 - protein, 15 aa, Bordetella pertussis
VHAVDLDFGVEGRLF

SEQ ID NO: 2185 - protein, 15 aa, Bordetella pertussis
LDFGVEGRLFDPAPL

SEQ ID NO: 2186 - protein, 15 aa, Bordetella pertussis
EGRLFDPAPLVQDYL

SEQ ID NO: 2187 - protein, 15 aa, Bordetella pertussis
DPAPLVQDYLNRPLD

SEQ ID NO: 2188 - protein, 15 aa, Bordetella pertussis
VQDYLNRPLDNEQLF

SEQ ID NO: 2189 - protein, 15 aa, Bordetella pertussis
NRPLDNEQLFLLVKA

SEQ ID NO: 2190 - protein, 15 aa, Bordetella pertussis
NEQLFLLVKALSAAL

SEQ ID NO: 2191 - protein, 15 aa, Bordetella pertussis
LLVKALSAALYDRGY

SEQ ID NO: 2192 - protein, 15 aa, Bordetella pertussis
LSAALYDRGYATSIV

SEQ ID NO: 2193 - protein, 15 aa, Bordetella pertussis
YDRGYATSIVTFVPP

SEQ ID NO: 2194 - protein, 15 aa, Bordetella pertussis
ATSIVTFVPPGVVDG

SEQ ID NO: 2195 - protein, 15 aa, Bordetella pertussis
TFVPPGVVDGVLKLK

SEQ ID NO: 2196 - protein, 15 aa, Bordetella pertussis
GVVDGVLKLKVEWGR

SEQ ID NO: 2197 - protein, 15 aa, Bordetella pertussis
VLKLKVEWGRIKGWL

SEQ ID NO: 2198 - protein, 15 aa, Bordetella pertussis
VEWGRIKGWLIDGKP

SEQ ID NO: 2199 - protein, 15 aa, Bordetella pertussis
IKGWLIDGKPLEGTR

SEQ ID NO: 2200 - protein, 15 aa, Bordetella pertussis
IDGKPLEGTRDRMMV

SEQ ID NO: 2201 - protein, 15 aa, Bordetella pertussis
LEGTRDRMMVFSAMP

SEQ ID NO: 2202 - protein, 15 aa, Bordetella pertussis
DRMMVFSAMPGWQDK

SEQ ID NO: 2203 - protein, 15 aa, Bordetella pertussis
FSAMPGWQDKVLNVF

SEQ ID NO: 2204 - protein, 15 aa, Bordetella pertussis
GWQDKVLNVFDIDQA

SEQ ID NO: 2205 - protein, 15 aa, Bordetella pertussis
VLNVFDIDQAIYNIN

SEQ ID NO: 2206 - protein, 15 aa, Bordetella pertussis
DIDQAIYNINNGGKT

SEQ ID NO: 2207 - protein, 15 aa, Bordetella pertussis
IYNINNGGKTGNITI

SEQ ID NO: 2208 - protein, 15 aa, Bordetella pertussis
NGGKTGNITIVPADE

SEQ ID NO: 2209 - protein, 15 aa, Bordetella pertussis
GNITIVPADEYGYSY

SEQ ID NO: 2210 - protein, 15 aa, Bordetella pertussis
VPADEYGYSYLDLQL

SEQ ID NO: 2211 - protein, 15 aa, Bordetella pertussis
YGYSYLDLQLQRRAL

SEQ ID NO: 2212 - protein, 15 aa, Bordetella pertussis
LDLQLQRRALPRVSL

SEQ ID NO: 2213 - protein, 15 aa, Bordetella pertussis
QRRALPRVSLGMDNS

SEQ ID NO: 2214 - protein, 15 aa, Bordetella pertussis
PRVSLGMDNSGPGTP

SEQ ID NO: 2215 - protein, 15 aa, Bordetella pertussis
GMDNSGPGTPENGRY

SEQ ID NO: 2216 - protein, 15 aa, Bordetella pertussis
GPGTPENGRYKYNAS

SEQ ID NO: 2217 - protein, 15 aa, Bordetella pertussis
ENGRYKYNASVTAND

SEQ ID NO: 2218 - protein, 15 aa, Bordetella pertussis
KYNASVTANDLLGLN

SEQ ID NO: 2219 - protein, 15 aa, Bordetella pertussis
VTANDLLGLNDTLGL

SEQ ID NO: 2220 - protein, 15 aa, Bordetella pertussis
LLGLNDTLGLYIGNR

SEQ ID NO: 2221 - protein, 15 aa, Bordetella pertussis
DTLGLYIGNRYYRDA

SEQ ID NO: 2222 - protein, 15 aa, Bordetella pertussis
YIGNRYYRDAGHDAE

SEQ ID NO: 2223 - protein, 15 aa, Bordetella pertussis
YYRDAGHDAERNYDL

SEQ ID NO: 2224 - protein, 15 aa, Bordetella pertussis
GHDAERNYDLMYSVP

SEQ ID NO: 2225 - protein, 15 aa, Bordetella pertussis
RNYDLMYSVPLGRTR

SEQ ID NO: 2226 - protein, 15 aa, Bordetella pertussis
MYSVPLGRTRLDLQT

SEQ ID NO: 2227 - protein, 15 aa, Bordetella pertussis
LGRTRLDLQTGYSTY

SEQ ID NO: 2228 - protein, 15 aa, Bordetella pertussis
LDLQTGYSTYRNLLK

SEQ ID NO: 2229 - protein, 15 aa, Bordetella pertussis
GYSTYRNLLKTRYGQ

SEQ ID NO: 2230 - protein, 15 aa, Bordetella pertussis
RNLLKTRYGQYQSAG

SEQ ID NO: 2231 - protein, 15 aa, Bordetella pertussis
TRYGQYQSAGNSRSF

SEQ ID NO: 2232 - protein, 15 aa, Bordetella pertussis
YQSAGNSRSFGLKAT

SEQ ID NO: 2233 - protein, 15 aa, Bordetella pertussis
NSRSFGLKATRLLYR

SEQ ID NO: 2234 - protein, 15 aa, Bordetella pertussis
GLKATRLLYRDTRSQ

SEQ ID NO: 2235 - protein, 15 aa, Bordetella pertussis
RLLYRDTRSQFSVYG

SEQ ID NO: 2236 - protein, 15 aa, Bordetella pertussis
DTRSQFSVYGGLKLR

SEQ ID NO: 2237 - protein, 15 aa, Bordetella pertussis
FSVYGGLKLRQNKNY

SEQ ID NO: 2238 - protein, 15 aa, Bordetella pertussis
GLKLRQNKNYLAGTR

SEQ ID NO: 2239 - protein, 15 aa, Bordetella pertussis
QNKNYLAGTRLDVSS

SEQ ID NO: 2240 - protein, 15 aa, Bordetella pertussis
LAGTRLDVSSKHYSD

SEQ ID NO: 2241 - protein, 15 aa, Bordetella pertussis
LDVSSKHYSDVTVGM

SEQ ID NO: 2242 - protein, 15 aa, Bordetella pertussis
KHYSDVTVGMQYSTQ

SEQ ID NO: 2243 - protein, 15 aa, Bordetella pertussis
VTVGMQYSTQRGANA

SEQ ID NO: 2244 - protein, 15 aa, Bordetella pertussis
QYSTQRGANAYFGDL

SEQ ID NO: 2245 - protein, 15 aa, Bordetella pertussis
RGANAYFGDLSFTRG

SEQ ID NO: 2246 - protein, 15 aa, Bordetella pertussis
YFGDLSFTRGVGVNN

SEQ ID NO: 2247 - protein, 15 aa, Bordetella pertussis
SFTRGVGVNNGKYAA

SEQ ID NO: 2248 - protein, 15 aa, Bordetella pertussis
VGVNNGKYAAYDERG

SEQ ID NO: 2249 - protein, 15 aa, Bordetella pertussis
GKYAAYDERGPQGNV

SEQ ID NO: 2250 - protein, 15 aa, Bordetella pertussis
YDERGPQGNVSRFNG

SEQ ID NO: 2251 - protein, 15 aa, Bordetella pertussis
PQGNVSRFNGSLAWT

SEQ ID NO: 2252 - protein, 15 aa, Bordetella pertussis
SRFNGSLAWTRYMAL

SEQ ID NO: 2253 - protein, 15 aa, Bordetella pertussis
SLAWTRYMALAGQPI

SEQ ID NO: 2254 - protein, 15 aa, Bordetella pertussis
RYMALAGQPIQWASQ

SEQ ID NO: 2255 - protein, 15 aa, Bordetella pertussis
AGQPIQWASQLGFQY

SEQ ID NO: 2256 - protein, 15 aa, Bordetella pertussis
QWASQLGFQYSRQQL

SEQ ID NO: 2257 - protein, 15 aa, Bordetella pertussis
LGFQYSRQQLLNSYQ

SEQ ID NO: 2258 - protein, 15 aa, Bordetella pertussis
SRQQLLNSYQITVGD

SEQ ID NO: 2259 - protein, 15 aa, Bordetella pertussis
LNSYQITVGDEYTVR

SEQ ID NO: 2260 - protein, 15 aa, Bordetella pertussis
ITVGDEYTVRGYNLR

SEQ ID NO: 2261 - protein, 15 aa, Bordetella pertussis
EYTVRGYNLRTSQSG

SEQ ID NO: 2262 - protein, 15 aa, Bordetella pertussis
GYNLRTSQSGDSGVY

SEQ ID NO: 2263 - protein, 15 aa, Bordetella pertussis
TSQSGDSGVYLSNTL

SEQ ID NO: 2264 - protein, 15 aa, Bordetella pertussis
DSGVYLSNTLTVPVQ

SEQ ID NO: 2265 - protein, 15 aa, Bordetella pertussis
LSNTLTVPVQFSLLG

SEQ ID NO: 2266 - protein, 15 aa, Bordetella pertussis
TVPVQFSLLGKQASV

SEQ ID NO: 2267 - protein, 15 aa, Bordetella pertussis
FSLLGKQASVAPFVG

SEQ ID NO: 2268 - protein, 15 aa, Bordetella pertussis
KQASVAPFVGADVGA

SEQ ID NO: 2269 - protein, 15 aa, Bordetella pertussis
APFVGADVGALKSNH

SEQ ID NO: 2270 - protein, 15 aa, Bordetella pertussis
ADVGALKSNHPDART

SEQ ID NO: 2271 - protein, 15 aa, Bordetella pertussis
LKSNHPDARTIRMAG

SEQ ID NO: 2272 - protein, 15 aa, Bordetella pertussis
PDARTIRMAGLAAGV

SEQ ID NO: 2273 - protein, 15 aa, Bordetella pertussis
IRMAGLAAGVRFDLP

SEQ ID NO: 2274 - protein, 15 aa, Bordetella pertussis
LAAGVRFDLPYARMS

SEQ ID NO: 2275 - protein, 15 aa, Bordetella pertussis
RFDLPYARMSFTYSK

SEQ ID NO: 2276 - protein, 15 aa, Bordetella pertussis
YARMSFTYSKPVGAQ

SEQ ID NO: 2277 - protein, 15 aa, Bordetella pertussis
FTYSKPVGAQPGGAP

SEQ ID NO: 2278 - protein, 15 aa, Bordetella pertussis
PVGAQPGGAPRAPVW

SEQ ID NO: 2279 - protein, 15 aa, Bordetella pertussis
PGGAPRAPVWLYINA

SEQ ID NO: 2280 - protein, 15 aa, Bordetella pertussis
PRAPVWLYINAGLSF

SEQ ID NO: 2281 - protein, 15 aa, Bordetella pertussis
MQAVLTAALPVFALI

SEQ ID NO: 2282 - protein, 15 aa, Bordetella pertussis
TAALPVFALILTGWL

SEQ ID NO: 2283 - protein, 15 aa, Bordetella pertussis
VFALILTGWLAARWR

SEQ ID NO: 2284 - protein, 15 aa, Bordetella pertussis
LTGWLAARWRVLGPS

SEQ ID NO: 2285 - protein, 15 aa, Bordetella pertussis
AARWRVLGPSATDAL

SEQ ID NO: 2286 - protein, 15 aa, Bordetella pertussis
VLGPSATDALNRYVV

SEQ ID NO: 2287 - protein, 15 aa, Bordetella pertussis
ATDALNRYVVYLSLP

SEQ ID NO: 2288 - protein, 15 aa, Bordetella pertussis
NRYVVYLSLPALLFR

SEQ ID NO: 2289 - protein, 15 aa, Bordetella pertussis
YLSLPALLFRAMAQA

SEQ ID NO: 2290 - protein, 15 aa, Bordetella pertussis
ALLFRAMAQADLRQL

SEQ ID NO: 2291 - protein, 15 aa, Bordetella pertussis
AMAQADLRQLADYWD

SEQ ID NO: 2292 - protein, 15 aa, Bordetella pertussis
DLRQLADYWDFTAAV

SEQ ID NO: 2293 - protein, 15 aa, Bordetella pertussis
ADYWDFTAAVAGGIA

SEQ ID NO: 2294 - protein, 15 aa, Bordetella pertussis
FTAAVAGGIALTFGA

SEQ ID NO: 2295 - protein, 15 aa, Bordetella pertussis
AGGIALTFGAAILAC

SEQ ID NO: 2296 - protein, 15 aa, Bordetella pertussis
LTFGAAILACRRDGA

SEQ ID NO: 2297 - protein, 15 aa, Bordetella pertussis
AILACRRDGARLTDL

SEQ ID NO: 2298 - protein, 15 aa, Bordetella pertussis
RRDGARLTDLSLEGL

SEQ ID NO: 2299 - protein, 15 aa, Bordetella pertussis
RLTDLSLEGLATSYG

SEQ ID NO: 2300 - protein, 15 aa, Bordetella pertussis
SLEGLATSYGNAGYM

SEQ ID NO: 2301 - protein, 15 aa, Bordetella pertussis
ATSYGNAGYMGIPLC

SEQ ID NO: 2302 - protein, 15 aa, Bordetella pertussis
NAGYMGIPLCLALLG

SEQ ID NO: 2303 - protein, 15 aa, Bordetella pertussis
GIPLCLALLGPASLA

SEQ ID NO: 2304 - protein, 15 aa, Bordetella pertussis
LALLGPASLAPAIIT

SEQ ID NO: 2305 - protein, 15 aa, Bordetella pertussis
PASLAPAIITTLLTA

SEQ ID NO: 2306 - protein, 15 aa, Bordetella pertussis
PAIITTLLTACVLFG

SEQ ID NO: 2307 - protein, 15 aa, Bordetella pertussis
TLLTACVLFGVAIAL

SEQ ID NO: 2308 - protein, 15 aa, Bordetella pertussis
CVLFGVAIALIEFDQ

SEQ ID NO: 2309 - protein, 15 aa, Bordetella pertussis
VAIALIEFDQHRDRH

SEQ ID NO: 2310 - protein, 15 aa, Bordetella pertussis
IEFDQHRDRHWSATL

SEQ ID NO: 2311 - protein, 15 aa, Bordetella pertussis
HRDRHWSATLLKVAR

SEQ ID NO: 2312 - protein, 15 aa, Bordetella pertussis
WSATLLKVARALLRN

SEQ ID NO: 2313 - protein, 15 aa, Bordetella pertussis
LKVARALLRNPLLAA

SEQ ID NO: 2314 - protein, 15 aa, Bordetella pertussis
ALLRNPLLAAPLLGL

SEQ ID NO: 2315 - protein, 15 aa, Bordetella pertussis
PLLAAPLLGLACAAA

SEQ ID NO: 2316 - protein, 15 aa, Bordetella pertussis
PLLGLACAAAGITLP

SEQ ID NO: 2317 - protein, 15 aa, Bordetella pertussis
ACAAAGITLPAGLDN

SEQ ID NO: 2318 - protein, 15 aa, Bordetella pertussis
GITLPAGLDNYAALL

SEQ ID NO: 2319 - protein, 15 aa, Bordetella pertussis
AGLDNYAALLGASAS

SEQ ID NO: 2320 - protein, 15 aa, Bordetella pertussis
YAALLGASASPCALV

SEQ ID NO: 2321 - protein, 15 aa, Bordetella pertussis
GASASPCALVTIGLF

SEQ ID NO: 2322 - protein, 15 aa, Bordetella pertussis
PCALVTIGLFLAQSQ

SEQ ID NO: 2323 - protein, 15 aa, Bordetella pertussis
TIGLFLAQSQPGGDR

SEQ ID NO: 2324 - protein, 15 aa, Bordetella pertussis
LAQSQPGGDRGTVGL

SEQ ID NO: 2325 - protein, 15 aa, Bordetella pertussis
PGGDRGTVGLMVGGK

SEQ ID NO: 2326 - protein, 15 aa, Bordetella pertussis
GTVGLMVGGKLLLHP

SEQ ID NO: 2327 - protein, 15 aa, Bordetella pertussis
MVGGKLLLHPAVTAV

SEQ ID NO: 2328 - protein, 15 aa, Bordetella pertussis
LLLHPAVTAVLAFAV

SEQ ID NO: 2329 - protein, 15 aa, Bordetella pertussis
AVTAVLAFAVFDMPP

SEQ ID NO: 2330 - protein, 15 aa, Bordetella pertussis
LAFAVFDMPPLWAWC

SEQ ID NO: 2331 - protein, 15 aa, Bordetella pertussis
FDMPPLWAWCAVLMA

SEQ ID NO: 2332 - protein, 15 aa, Bordetella pertussis
LWAWCAVLMAALPIG

SEQ ID NO: 2333 - protein, 15 aa, Bordetella pertussis
AVLMAALPIGTGPFM

SEQ ID NO: 2334 - protein, 15 aa, Bordetella pertussis
ALPIGTGPFMLAQLY

SEQ ID NO: 2335 - protein, 15 aa, Bordetella pertussis
TGPFMLAQLYGRDAR

SEQ ID NO: 2336 - protein, 15 aa, Bordetella pertussis
LAQLYGRDARPSSRA

SEQ ID NO: 2337 - protein, 15 aa, Bordetella pertussis
GRDARPSSRAILLST

SEQ ID NO: 2338 - protein, 15 aa, Bordetella pertussis
PSSRAILLSTVLSVP

SEQ ID NO: 2339 - protein, 15 aa, Bordetella pertussis
ILLSTVLSVPTITAL

SEQ ID NO: 2340 - protein, 15 aa, Bordetella pertussis
VLSVPTITALVAWIG

SEQ ID NO: 2341 - protein, 15 aa, Bordetella pertussis
TITALVAWIGRQPLG

SEQ ID NO: 2342 - protein, 15 aa, Bordetella pertussis
MPTPLTLADFDYHLP

SEQ ID NO: 2343 - protein, 15 aa, Bordetella pertussis
TLADFDYHLPPELIA

SEQ ID NO: 2344 - protein, 15 aa, Bordetella pertussis
DYHLPPELIAQSPAA

SEQ ID NO: 2345 - protein, 15 aa, Bordetella pertussis
PELIAQSPAAERGGS

SEQ ID NO: 2346 - protein, 15 aa, Bordetella pertussis
QSPAAERGGSRLLHL

SEQ ID NO: 2347 - protein, 15 aa, Bordetella pertussis
ERGGSRLLHLDAASR

SEQ ID NO: 2348 - protein, 15 aa, Bordetella pertussis
RLLHLDAASRLHDRR

SEQ ID NO: 2349 - protein, 15 aa, Bordetella pertussis
DAASRLHDRRFPDLA

SEQ ID NO: 2350 - protein, 15 aa, Bordetella pertussis
LHDRRFPDLAGLLRP

SEQ ID NO: 2351 - protein, 15 aa, Bordetella pertussis
FPDLAGLLRPHDLLV

SEQ ID NO: 2352 - protein, 15 aa, Bordetella pertussis
GLLRPHDLLVFNDTR

SEQ ID NO: 2353 - protein, 15 aa, Bordetella pertussis
HDLLVFNDTRVIKAR

SEQ ID NO: 2354 - protein, 15 aa, Bordetella pertussis
FNDTRVIKARLTGQK

SEQ ID NO: 2355 - protein, 15 aa, Bordetella pertussis
VIKARLTGQKATGGK

SEQ ID NO: 2356 - protein, 15 aa, Bordetella pertussis
LTGQKATGGKVEVLV

SEQ ID NO: 2357 - protein, 15 aa, Bordetella pertussis
ATGGKVEVLVERITA

SEQ ID NO: 2358 - protein, 15 aa, Bordetella pertussis
VEVLVERITAPDRAL

SEQ ID NO: 2359 - protein, 15 aa, Bordetella pertussis
ERITAPDRALAHVRA

SEQ ID NO: 2360 - protein, 15 aa, Bordetella pertussis
PDRALAHVRASKSPG

SEQ ID NO: 2361 - protein, 15 aa, Bordetella pertussis
AHVRASKSPGPGMRL

SEQ ID NO: 2362 - protein, 15 aa, Bordetella pertussis
SKSPGPGMRLRLAEA

SEQ ID NO: 2363 - protein, 15 aa, Bordetella pertussis
PGMRLRLAEAFEAEV

SEQ ID NO: 2364 - protein, 15 aa, Bordetella pertussis
RLAEAFEAEVLGREG

SEQ ID NO: 2365 - protein, 15 aa, Bordetella pertussis
FEAEVLGREGELFDL

SEQ ID NO: 2366 - protein, 15 aa, Bordetella pertussis
LGREGELFDLRFPAP

SEQ ID NO: 2367 - protein, 15 aa, Bordetella pertussis
ELFDLRFPAPVLDLL

SEQ ID NO: 2368 - protein, 15 aa, Bordetella pertussis
RFPAPVLDLLDAHGA

SEQ ID NO: 2369 - protein, 15 aa, Bordetella pertussis
VLDLLDAHGATPLPP

SEQ ID NO: 2370 - protein, 15 aa, Bordetella pertussis
DAHGATPLPPYITHA

SEQ ID NO: 2371 - protein, 15 aa, Bordetella pertussis
TPLPPYITHAADATD

SEQ ID NO: 2372 - protein, 15 aa, Bordetella pertussis
YITHAADATDERRYQ

SEQ ID NO: 2373 - protein, 15 aa, Bordetella pertussis
ADATDERRYQTVYAR

SEQ ID NO: 2374 - protein, 15 aa, Bordetella pertussis
ERRYQTVYAREPGAV

SEQ ID NO: 2375 - protein, 15 aa, Bordetella pertussis
TVYAREPGAVAAPTA

SEQ ID NO: 2376 - protein, 15 aa, Bordetella pertussis
EPGAVAAPTAGLHFD

SEQ ID NO: 2377 - protein, 15 aa, Bordetella pertussis
AAPTAGLHFDQPMLE

SEQ ID NO: 2378 - protein, 15 aa, Bordetella pertussis
GLHFDQPMLEQLAAQ

SEQ ID NO: 2379 - protein, 15 aa, Bordetella pertussis
QPMLEQLAAQGVQRA

SEQ ID NO: 2380 - protein, 15 aa, Bordetella pertussis
QLAAQGVQRAFVTLH

SEQ ID NO: 2381 - protein, 15 aa, Bordetella pertussis
GVQRAFVTLHVGAGT

SEQ ID NO: 2382 - protein, 15 aa, Bordetella pertussis
FVTLHVGAGTFQPVR

SEQ ID NO: 2383 - protein, 15 aa, Bordetella pertussis
VGAGTFQPVRVQNLA

SEQ ID NO: 2384 - protein, 15 aa, Bordetella pertussis
FQPVRVQNLAEHIMH

SEQ ID NO: 2385 - protein, 15 aa, Bordetella pertussis
VQNLAEHIMHAEWYT

SEQ ID NO: 2386 - protein, 15 aa, Bordetella pertussis
EHIMHAEWYTVPEAT

SEQ ID NO: 2387 - protein, 15 aa, Bordetella pertussis
AEWYTVPEATVAAIA

SEQ ID NO: 2388 - protein, 15 aa, Bordetella pertussis
VPEATVAAIARARAH

SEQ ID NO: 2389 - protein, 15 aa, Bordetella pertussis
VAAIARARAHGGRIV

SEQ ID NO: 2390 - protein, 15 aa, Bordetella pertussis
RARAHGGRIVAVGTT

SEQ ID NO: 2391 - protein, 15 aa, Bordetella pertussis
GGRIVAVGTTSVRAL

SEQ ID NO: 2392 - protein, 15 aa, Bordetella pertussis
AVGTTSVRALESAAA

SEQ ID NO: 2393 - protein, 15 aa, Bordetella pertussis
SVRALESAAAQAQDG

SEQ ID NO: 2394 - protein, 15 aa, Bordetella pertussis
ESAAAQAQDGPLAAA

SEQ ID NO: 2395 - protein, 15 aa, Bordetella pertussis
QAQDGPLAAAQGDTR

SEQ ID NO: 2396 - protein, 15 aa, Bordetella pertussis
PLAAAQGDTRLFITP

SEQ ID NO: 2397 - protein, 15 aa, Bordetella pertussis
QGDTRLFITPGYRYR

SEQ ID NO: 2398 - protein, 15 aa, Bordetella pertussis
LFITPGYRYRAVDAL

SEQ ID NO: 2399 - protein, 15 aa, Bordetella pertussis
GYRYRAVDALLTNFH

SEQ ID NO: 2400 - protein, 15 aa, Bordetella pertussis
AVDALLTNFHLPQST

SEQ ID NO: 2401 - protein, 15 aa, Bordetella pertussis
LTNFHLPQSTLLMLV

SEQ ID NO: 2402 - protein, 15 aa, Bordetella pertussis
LPQSTLLMLVSALAG

SEQ ID NO: 2403 - protein, 15 aa, Bordetella pertussis
LLMLVSALAGVEPIR

SEQ ID NO: 2404 - protein, 15 aa, Bordetella pertussis
SALAGVEPIRRAYAH

SEQ ID NO: 2405 - protein, 15 aa, Bordetella pertussis
VEPIRRAYAHAVAER

SEQ ID NO: 2406 - protein, 15 aa, Bordetella pertussis
RAYAHAVAERYRFFS

SEQ ID NO: 2407 - protein, 15 aa, Bordetella pertussis
AVAERYRFFSYGDAM

SEQ ID NO: 2408 - protein, 15 aa, Bordetella pertussis
YRFFSYGDAMFIETP

SEQ ID NO: 2409 - protein, 15 aa, Bordetella pertussis
FFSYGDAMFIETPAP

SEQ ID NO: 2410 - protein, 15 aa, Bordetella pertussis
MQDLNDLYYFAQVVE

SEQ ID NO: 2411 - protein, 15 aa, Bordetella pertussis
DLYYFAQVVEQGGFS

SEQ ID NO: 2412 - protein, 15 aa, Bordetella pertussis
AQVVEQGGFSAASRV

SEQ ID NO: 2413 - protein, 15 aa, Bordetella pertussis
QGGFSAASRVLDVPK

SEQ ID NO: 2414 - protein, 15 aa, Bordetella pertussis
AASRVLDVPKSRLSR

SEQ ID NO: 2415 - protein, 15 aa, Bordetella pertussis
LDVPKSRLSRRISQL

SEQ ID NO: 2416 - protein, 15 aa, Bordetella pertussis
SRLSRRISQLEDRLG

SEQ ID NO: 2417 - protein, 15 aa, Bordetella pertussis
RISQLEDRLGVRLLQ

SEQ ID NO: 2418 - protein, 15 aa, Bordetella pertussis
EDRLGVRLLQRTTRR

SEQ ID NO: 2419 - protein, 15 aa, Bordetella pertussis
VRLLQRTTRRLRLTT

SEQ ID NO: 2420 - protein, 15 aa, Bordetella pertussis
RTTRRLRLTTAGERY

SEQ ID NO: 2421 - protein, 15 aa, Bordetella pertussis
LRLTTAGERYLHYCQ

SEQ ID NO: 2422 - protein, 15 aa, Bordetella pertussis
AGERYLHYCQEMTAS

SEQ ID NO: 2423 - protein, 15 aa, Bordetella pertussis
LHYCQEMTASARAAE

SEQ ID NO: 2424 - protein, 15 aa, Bordetella pertussis
EMTASARAAEDAMRQ

SEQ ID NO: 2425 - protein, 15 aa, Bordetella pertussis
ARAAEDAMRQLQSAP

SEQ ID NO: 2426 - protein, 15 aa, Bordetella pertussis
DAMRQLQSAPAGPVV

SEQ ID NO: 2427 - protein, 15 aa, Bordetella pertussis
LQSAPAGPVVVSCPV

SEQ ID NO: 2428 - protein, 15 aa, Bordetella pertussis
AGPVVVSCPVSIAQQ

SEQ ID NO: 2429 - protein, 15 aa, Bordetella pertussis
VSCPVSIAQQMLAPL

SEQ ID NO: 2430 - protein, 15 aa, Bordetella pertussis
SIAQQMLAPLLPEFL

SEQ ID NO: 2431 - protein, 15 aa, Bordetella pertussis
MLAPLLPEFLDAWPS

SEQ ID NO: 2432 - protein, 15 aa, Bordetella pertussis
LPEFLDAWPSVSVQL

SEQ ID NO: 2433 - protein, 15 aa, Bordetella pertussis
DAWPSVSVQLLVTNR

SEQ ID NO: 2434 - protein, 15 aa, Bordetella pertussis
VSVQLLVTNRRVDVI

SEQ ID NO: 2435 - protein, 15 aa, Bordetella pertussis
LVTNRRVDVIREGVD

SEQ ID NO: 2436 - protein, 15 aa, Bordetella pertussis
RVDVIREGVDLALRV

SEQ ID NO: 2437 - protein, 15 aa, Bordetella pertussis
REGVDLALRVRTKLD

SEQ ID NO: 2438 - protein, 15 aa, Bordetella pertussis
LALRVRTKLDTDAEL

SEQ ID NO: 2439 - protein, 15 aa, Bordetella pertussis
RTKLDTDAELVVKHL

SEQ ID NO: 2440 - protein, 15 aa, Bordetella pertussis
TDAELVVKHLGIASG

SEQ ID NO: 2441 - protein, 15 aa, Bordetella pertussis
VVKHLGIASGTLVAS

SEQ ID NO: 2442 - protein, 15 aa, Bordetella pertussis
GIASGTLVASPAYLQ

SEQ ID NO: 2443 - protein, 15 aa, Bordetella pertussis
TLVASPAYLQRHGTP

SEQ ID NO: 2444 - protein, 15 aa, Bordetella pertussis
PAYLQRHGTPETPQE

SEQ ID NO: 2445 - protein, 15 aa, Bordetella pertussis
RHGTPETPQELASHR

SEQ ID NO: 2446 - protein, 15 aa, Bordetella pertussis
ETPQELASHRTLSFN

SEQ ID NO: 2447 - protein, 15 aa, Bordetella pertussis
LASHRTLSFNDPQNE

SEQ ID NO: 2448 - protein, 15 aa, Bordetella pertussis
TLSFNDPQNEVRWPL

SEQ ID NO: 2449 - protein, 15 aa, Bordetella pertussis
DPQNEVRWPLTNQRG

SEQ ID NO: 2450 - protein, 15 aa, Bordetella pertussis
VRWPLTNQRGESVEV

SEQ ID NO: 2451 - protein, 15 aa, Bordetella pertussis
TNQRGESVEVAVQPV

SEQ ID NO: 2452 - protein, 15 aa, Bordetella pertussis
ESVEVAVQPVLASND

SEQ ID NO: 2453 - protein, 15 aa, Bordetella pertussis
AVQPVLASNDFIVLT

SEQ ID NO: 2454 - protein, 15 aa, Bordetella pertussis
LASNDFIVLTQAAVR

SEQ ID NO: 2455 - protein, 15 aa, Bordetella pertussis
FIVLTQAAVRGRGIA

SEQ ID NO: 2456 - protein, 15 aa, Bordetella pertussis
QAAVRGRGIALLPSM

SEQ ID NO: 2457 - protein, 15 aa, Bordetella pertussis
GRGIALLPSMASEAE

SEQ ID NO: 2458 - protein, 15 aa, Bordetella pertussis
LLPSMASEAELRRGE

SEQ ID NO: 2459 - protein, 15 aa, Bordetella pertussis
ASEAELRRGELVRVL

SEQ ID NO: 2460 - protein, 15 aa, Bordetella pertussis
LRRGELVRVLPDWRS

SEQ ID NO: 2461 - protein, 15 aa, Bordetella pertussis
LVRVLPDWRSPEGIV

SEQ ID NO: 2462 - protein, 15 aa, Bordetella pertussis
PDWRSPEGIVHCIYP

SEQ ID NO: 2463 - protein, 15 aa, Bordetella pertussis
PEGIVHCIYPSRRGM

SEQ ID NO: 2464 - protein, 15 aa, Bordetella pertussis
HCIYPSRRGMMPAVR

SEQ ID NO: 2465 - protein, 15 aa, Bordetella pertussis
SRRGMMPAVRAFLDF

SEQ ID NO: 2466 - protein, 15 aa, Bordetella pertussis
MPAVRAFLDFLAKRV

SEQ ID NO: 2467 - protein, 15 aa, Bordetella pertussis
AFLDFLAKRVPPLVR

SEQ ID NO: 2468 - protein, 15 aa, Bordetella pertussis
LAKRVPPLVRQSDTA

SEQ ID NO: 2469 - protein, 15 aa, Bordetella pertussis
KRVPPLVRQSDTARP

SEQ ID NO: 2470 - protein, 15 aa, Bordetella pertussis
MTQTPNTGSPHRVVI

SEQ ID NO: 2471 - protein, 15 aa, Bordetella pertussis
NTGSPHRVVIVGGGA

SEQ ID NO: 2472 - protein, 15 aa, Bordetella pertussis
HRVVIVGGGAGGLEL

SEQ ID NO: 2473 - protein, 15 aa, Bordetella pertussis
VGGGAGGLELAAKLG

SEQ ID NO: 2474 - protein, 15 aa, Bordetella pertussis
GGLELAAKLGRAHGR

SEQ ID NO: 2475 - protein, 15 aa, Bordetella pertussis
AAKLGRAHGRERVTL

SEQ ID NO: 2476 - protein, 15 aa, Bordetella pertussis
RAHGRERVTLVDSRP

SEQ ID NO: 2477 - protein, 15 aa, Bordetella pertussis
ERVTLVDSRPFHIWK

SEQ ID NO: 2478 - protein, 15 aa, Bordetella pertussis
VDSRPFHIWKPSLHE

SEQ ID NO: 2479 - protein, 15 aa, Bordetella pertussis
FHIWKPSLHEAAAGT

SEQ ID NO: 2480 - protein, 15 aa, Bordetella pertussis
PSLHEAAAGTLDIHQ

SEQ ID NO: 2481 - protein, 15 aa, Bordetella pertussis
AAAGTLDIHQEGLSY

SEQ ID NO: 2482 - protein, 15 aa, Bordetella pertussis
LDIHQEGLSYLMLAN

SEQ ID NO: 2483 - protein, 15 aa, Bordetella pertussis
EGLSYLMLANMCNFT

SEQ ID NO: 2484 - protein, 15 aa, Bordetella pertussis
LMLANMCNFTFAQGE

SEQ ID NO: 2485 - protein, 15 aa, Bordetella pertussis
MCNFTFAQGELQGIE

SEQ ID NO: 2486 - protein, 15 aa, Bordetella pertussis
FAQGELQGIERERRQ

SEQ ID NO: 2487 - protein, 15 aa, Bordetella pertussis
LQGIERERRQIQVGP

SEQ ID NO: 2488 - protein, 15 aa, Bordetella pertussis
RERRQIQVGPVADPS

SEQ ID NO: 2489 - protein, 15 aa, Bordetella pertussis
IQVGPVADPSGQQVL

SEQ ID NO: 2490 - protein, 15 aa, Bordetella pertussis
VADPSGQQVLPPREL

SEQ ID NO: 2491 - protein, 15 aa, Bordetella pertussis
GQQVLPPRELSYDTL

SEQ ID NO: 2492 - protein, 15 aa, Bordetella pertussis
PPRELSYDTLVLAMG

SEQ ID NO: 2493 - protein, 15 aa, Bordetella pertussis
SYDTLVLAMGSTSNF

SEQ ID NO: 2494 - protein, 15 aa, Bordetella pertussis
VLAMGSTSNFFNTPG

SEQ ID NO: 2495 - protein, 15 aa, Bordetella pertussis
STSNFFNTPGAAEHA

SEQ ID NO: 2496 - protein, 15 aa, Bordetella pertussis
FNTPGAAEHAVTLDT

SEQ ID NO: 2497 - protein, 15 aa, Bordetella pertussis
AAEHAVTLDTTENAE

SEQ ID NO: 2498 - protein, 15 aa, Bordetella pertussis
VTLDTTENAEQFRLT

SEQ ID NO: 2499 - protein, 15 aa, Bordetella pertussis
TENAEQFRLTMLKAM

SEQ ID NO: 2500 - protein, 15 aa, Bordetella pertussis
QFRLTMLKAMVQVDL

SEQ ID NO: 2501 - protein, 15 aa, Bordetella pertussis
MLKAMVQVDLRKVHD

SEQ ID NO: 2502 - protein, 15 aa, Bordetella pertussis
VQVDLRKVHDPSARL

SEQ ID NO: 2503 - protein, 15 aa, Bordetella pertussis
RKVHDPSARLDLVIV

SEQ ID NO: 2504 - protein, 15 aa, Bordetella pertussis
PSARLDLVIVGGGAT

SEQ ID NO: 2505 - protein, 15 aa, Bordetella pertussis
DLVIVGGGATGVELA

SEQ ID NO: 2506 - protein, 15 aa, Bordetella pertussis
GGGATGVELAVELIE

SEQ ID NO: 2507 - protein, 15 aa, Bordetella pertussis
GVELAVELIEASHVV

SEQ ID NO: 2508 - protein, 15 aa, Bordetella pertussis
VELIEASHVVSAYGL

SEQ ID NO: 2509 - protein, 15 aa, Bordetella pertussis
ASHVVSAYGLPNFRA

SEQ ID NO: 2510 - protein, 15 aa, Bordetella pertussis
SAYGLPNFRADRDLV

SEQ ID NO: 2511 - protein, 15 aa, Bordetella pertussis
PNFRADRDLVITLVE

SEQ ID NO: 2512 - protein, 15 aa, Bordetella pertussis
DRDLVITLVEGAPRI

SEQ ID NO: 2513 - protein, 15 aa, Bordetella pertussis
ITLVEGAPRILSALP

SEQ ID NO: 2514 - protein, 15 aa, Bordetella pertussis
GAPRILSALPEKISR

SEQ ID NO: 2515 - protein, 15 aa, Bordetella pertussis
LSALPEKISRATHAR

SEQ ID NO: 2516 - protein, 15 aa, Bordetella pertussis
EKISRATHARLTELG

SEQ ID NO: 2517 - protein, 15 aa, Bordetella pertussis
ATHARLTELGVRVET

SEQ ID NO: 2518 - protein, 15 aa, Bordetella pertussis
LTELGVRVETDCRVA

SEQ ID NO: 2519 - protein, 15 aa, Bordetella pertussis
VRVETDCRVAEVGAD

SEQ ID NO: 2520 - protein, 15 aa, Bordetella pertussis
DCRVAEVGADHVVTA

SEQ ID NO: 2521 - protein, 15 aa, Bordetella pertussis
EVGADHVVTADGRRF

SEQ ID NO: 2522 - protein, 15 aa, Bordetella pertussis
HVVTADGRRFEATMC

SEQ ID NO: 2523 - protein, 15 aa, Bordetella pertussis
DGRRFEATMCLWAAG

SEQ ID NO: 2524 - protein, 15 aa, Bordetella pertussis
EATMCLWAAGIEGPP

SEQ ID NO: 2525 - protein, 15 aa, Bordetella pertussis
LWAAGIEGPPLFRQL

SEQ ID NO: 2526 - protein, 15 aa, Bordetella pertussis
IEGPPLFRQLGLPLN

SEQ ID NO: 2527 - protein, 15 aa, Bordetella pertussis
LFRQLGLPLNRLGQL

SEQ ID NO: 2528 - protein, 15 aa, Bordetella pertussis
GLPLNRLGQLEVNER

SEQ ID NO: 2529 - protein, 15 aa, Bordetella pertussis
RLGQLEVNERQESPD

SEQ ID NO: 2530 - protein, 15 aa, Bordetella pertussis
EVNERQESPDPHILA

SEQ ID NO: 2531 - protein, 15 aa, Bordetella pertussis
QESPDPHILALGDCC

SEQ ID NO: 2532 - protein, 15 aa, Bordetella pertussis
PHILALGDCCAAPWK

SEQ ID NO: 2533 - protein, 15 aa, Bordetella pertussis
LGDCCAAPWKDGRTV

SEQ ID NO: 2534 - protein, 15 aa, Bordetella pertussis
AAPWKDGRTVPARAQ

SEQ ID NO: 2535 - protein, 15 aa, Bordetella pertussis
DGRTVPARAQAAHQQ

SEQ ID NO: 2536 - protein, 15 aa, Bordetella pertussis
PARAQAAHQQADYLA

SEQ ID NO: 2537 - protein, 15 aa, Bordetella pertussis
AAHQQADYLARKLTA

SEQ ID NO: 2538 - protein, 15 aa, Bordetella pertussis
ADYLARKLTARLRNA

SEQ ID NO: 2539 - protein, 15 aa, Bordetella pertussis
RKLTARLRNAAEPTE

SEQ ID NO: 2540 - protein, 15 aa, Bordetella pertussis
RLRNAAEPTEAYAYH

SEQ ID NO: 2541 - protein, 15 aa, Bordetella pertussis
AEPTEAYAYHDHGSL

SEQ ID NO: 2542 - protein, 15 aa, Bordetella pertussis
AYAYHDHGSLVSLGQ

SEQ ID NO: 2543 - protein, 15 aa, Bordetella pertussis
DHGSLVSLGQGSGVG

SEQ ID NO: 2544 - protein, 15 aa, Bordetella pertussis
VSLGQGSGVGSLMGK

SEQ ID NO: 2545 - protein, 15 aa, Bordetella pertussis
GSGVGSLMGKLAGRG

SEQ ID NO: 2546 - protein, 15 aa, Bordetella pertussis
SLMGKLAGRGLFVSG

SEQ ID NO: 2547 - protein, 15 aa, Bordetella pertussis
LAGRGLFVSGTLARL

SEQ ID NO: 2548 - protein, 15 aa, Bordetella pertussis
LFVSGTLARLMYMSL

SEQ ID NO: 2549 - protein, 15 aa, Bordetella pertussis
TLARLMYMSLHLMHH

SEQ ID NO: 2550 - protein, 15 aa, Bordetella pertussis
MYMSLHLMHHRAVLG

SEQ ID NO: 2551 - protein, 15 aa, Bordetella pertussis
HLMHHRAVLGISRTA

SEQ ID NO: 2552 - protein, 15 aa, Bordetella pertussis
RAVLGISRTATLALA

SEQ ID NO: 2553 - protein, 15 aa, Bordetella pertussis
ISRTATLALARLLMR

SEQ ID NO: 2554 - protein, 15 aa, Bordetella pertussis
TLALARLLMRRTRPR

SEQ ID NO: 2555 - protein, 15 aa, Bordetella pertussis
ARLLMRRTRPRVKLH

SEQ ID NO: 2556 - protein, 15 aa, Bordetella pertussis
MSDTDPFSLALFLAL

SEQ ID NO: 2557 - protein, 15 aa, Bordetella pertussis
PFSLALFLALLALVP

SEQ ID NO: 2558 - protein, 15 aa, Bordetella pertussis
LFLALLALVPLIVVM

SEQ ID NO: 2559 - protein, 15 aa, Bordetella pertussis
LALVPLIVVMTTSFL

SEQ ID NO: 2560 - protein, 15 aa, Bordetella pertussis
LIVVMTTSFLKIAVV

SEQ ID NO: 2561 - protein, 15 aa, Bordetella pertussis
TTSFLKIAVVLALVR

SEQ ID NO: 2562 - protein, 15 aa, Bordetella pertussis
KIAVVLALVRNALGV

SEQ ID NO: 2563 - protein, 15 aa, Bordetella pertussis
LALVRNALGVQQVPP

SEQ ID NO: 2564 - protein, 15 aa, Bordetella pertussis
NALGVQQVPPNMALY

SEQ ID NO: 2565 - protein, 15 aa, Bordetella pertussis
QQVPPNMALYGLALI

SEQ ID NO: 2566 - protein, 15 aa, Bordetella pertussis
NMALYGLALILSAYV

SEQ ID NO: 2567 - protein, 15 aa, Bordetella pertussis
GLALILSAYVMAPVV

SEQ ID NO: 2568 - protein, 15 aa, Bordetella pertussis
LSAYVMAPVVHRIGT

SEQ ID NO: 2569 - protein, 15 aa, Bordetella pertussis
MAPVVHRIGTEVQAL

SEQ ID NO: 2570 - protein, 15 aa, Bordetella pertussis
HRIGTEVQALTAQAG

SEQ ID NO: 2571 - protein, 15 aa, Bordetella pertussis
EVQALTAQAGESGTA

SEQ ID NO: 2572 - protein, 15 aa, Bordetella pertussis
TAQAGESGTAAPMAL

SEQ ID NO: 2573 - protein, 15 aa, Bordetella pertussis
ESGTAAPMALDAVLG

SEQ ID NO: 2574 - protein, 15 aa, Bordetella pertussis
APMALDAVLGVAERG

SEQ ID NO: 2575 - protein, 15 aa, Bordetella pertussis
DAVLGVAERGVGPLR

SEQ ID NO: 2576 - protein, 15 aa, Bordetella pertussis
VAERGVGPLRAFMLR

SEQ ID NO: 2577 - protein, 15 aa, Bordetella pertussis
VGPLRAFMLRNSQPA

SEQ ID NO: 2578 - protein, 15 aa, Bordetella pertussis
AFMLRNSQPAQRDFF

SEQ ID NO: 2579 - protein, 15 aa, Bordetella pertussis
NSQPAQRDFFLRTAR

SEQ ID NO: 2580 - protein, 15 aa, Bordetella pertussis
QRDFFLRTARHLWGE

SEQ ID NO: 2581 - protein, 15 aa, Bordetella pertussis
LRTARHLWGEEASRD

SEQ ID NO: 2582 - protein, 15 aa, Bordetella pertussis
HLWGEEASRDLSEDN

SEQ ID NO: 2583 - protein, 15 aa, Bordetella pertussis
EASRDLSEDNLLVLT

SEQ ID NO: 2584 - protein, 15 aa, Bordetella pertussis
LSEDNLLVLTPAFLV

SEQ ID NO: 2585 - protein, 15 aa, Bordetella pertussis
LLVLTPAFLVSELTA

SEQ ID NO: 2586 - protein, 15 aa, Bordetella pertussis
PAFLVSELTAAFQLG

SEQ ID NO: 2587 - protein, 15 aa, Bordetella pertussis
SELTAAFQLGFLLYL

SEQ ID NO: 2588 - protein, 15 aa, Bordetella pertussis
AFQLGFLLYLPFIII

SEQ ID NO: 2589 - protein, 15 aa, Bordetella pertussis
FLLYLPFIIIDLIVS

SEQ ID NO: 2590 - protein, 15 aa, Bordetella pertussis
PFIIIDLIVSNILLA

SEQ ID NO: 2591 - protein, 15 aa, Bordetella pertussis
DLIVSNILLAMGMMM

SEQ ID NO: 2592 - protein, 15 aa, Bordetella pertussis
NILLAMGMMMVSPVT

SEQ ID NO: 2593 - protein, 15 aa, Bordetella pertussis
MGMMMVSPVTISMPL

SEQ ID NO: 2594 - protein, 15 aa, Bordetella pertussis
VSPVTISMPLKLFLF

SEQ ID NO: 2595 - protein, 15 aa, Bordetella pertussis
ISMPLKLFLFVMVDG

SEQ ID NO: 2596 - protein, 15 aa, Bordetella pertussis
KLFLFVMVDGWTRLI

SEQ ID NO: 2597 - protein, 15 aa, Bordetella pertussis
VMVDGWTRLIQGLVL

SEQ ID NO: 2598 - protein, 15 aa, Bordetella pertussis
DGWTRLIQGLVLSYR

SEQ ID NO: 2599 - protein, 478 aa, Bordetella pertussis
MRRAGKQGKWQQWLAGVMLALGAAGAAAQGLPSSLVAAWKATKLPDQSLSLVVQEINGPRLATLNAKEPRNPASVMKLVTTWAALSELGPSYAWRTEFLTEPGNRPDAHGVLRGPLYLRAGGDPQLLLQDLWALLRELRLRGVKQIGDLVVDRSIFGQVAIDPGAFDGASDRAYNASPDALMVGFGAQRLLFTPDAAARKWVPMIDPPLPGLRLEGAVEWSDVRCPGPPVVGTEPVVTQQGVSIRLSGKVAGSCGEFSLYRLALSQPEYASAVFRLLWRELGGTLKGQIRSGVVPPDAVVLASHDSPTLGEAIRTINKRSNNVMARTLLLTLGAERGRRPATVESSGVVARTVLGAQGLEMPELVIDNGSGLSREGRVSADSLASMLTVAWNSPLMPEFISSLAIAGVDGTVRRRLKGNGAQGMAHLKTGSLRDVRAVAGYVLGASGKRYVVVSMVNHENAAAVRSFDDALVAWLAEQ

SEQ ID NO: 2600 - protein, 563 aa, Bordetella pertussis
MDIRRTVLWMIFSFSLLLLWNNWQIHNGKPSLFGGPAPEAAATQQPKADANGTAASSTASIPSSPAAAPAAASVPGAAAPAAAKSEQVVITTDVLRLTFDSNGAQLIRAELLKYPSSSQSDKPTVLMDRSADLVYVAQTGVVGAPQGESFPTHQTPFHLVSSERSLTGDTLDVVFEAESGGLKVTKTYTLHRGRYDVDVRHAMANTGGAPLNPALYLQLERDGTDPAGTSSFYHTFTGVAVYSEQDKFQKVTFSDIEKKKGTYIKQADNGWIGIVQHYFATAWIPAQGKQRTNELLQVQQNLYAARTIEAVGTIAPGSSANVDAHLWVGPQDQKAMAAVAPGLELVVDYGWLTIIAKPLFTLMTWLHGLLGNWGWTIVALTVIIKAVFFPLAAASYRSMARMKQVAPRLQALKEKYGDDRQKLNQAMMEMYRTEKINPLGGCLPMVVQIPVFIALYWVLLASVEMRGAPWILWVHDLSVRDPFFILPAIMMATMFLQIKLNPTPPDPVQAKVMMIMPLVFGGMMFFFPAGLVLYWCVNNTLSIAQQWTITRNLERQAAAAANR

SEQ ID NO: 2601 - protein, 1113 aa, Bordetella pertussis
MPATHPAPDPLWYKDAVIYQLHVKSFFDANDDGVGDFAGLLAKLDYIVELGVNTIWLLPFYPSPRRDDGYDIADYRGVHPDYGSLADARLLVRAAHARGLRVITELVINHTSDQHPWFQRARAARPGSAHRAYYVWSDDDKAYAGTRIIFCDTEKSNWTWDPVAGAYFWHRFYSHQPDLNYDNPQVLREVLGAMRYWLDMGVDGLRLDAVPYLVEREGTNNENLPETHAILRRIRRVIDSEYPGRMLLAEANQWPEDAQEYFGAGDECHMAFHFPLMPRMYMAIAQEDRLPVTDIIRQTPSIAPQCQWAIFLRNHDELTLEMVTSRERDYLWNVYAAEPRARINLGIRRRLAPLLERDRRRIELMNSLLLSMPGTPVLYYGDELGMGDNIHLGDRDGVRTPMQWSPDRNGGFSRADPERLPLPLLMGPLYGYEAVNVEAQQRDPHSLLNWTRRMLAKRRQSHVFGRGELSFLYPGNRKILAYLRTWEDTVVLCVANLSQAAQPVELHLSEYAGRVPVEMLGGTAFPQIGELPYLLTLPPFGFYWLDLSAGAAPPAWHSELPPQMPESITLVSRGAGAALRLTEASRRQLEADVLPAYLQRQRWYAARRKPGVMRLAYSVPLNDDVESYYEAEIEVSDDGPPRRFHTPVALAWQDDTAAQYPLARVRRGAQLGTLTDASLQPGYARVLLAALTAGRDIQAGGEPAVRLRFLPEPGLADLALRDDSEVRALSADQSNSSLLVGERVVFKLLRELHAGPHPEAEMTRYLTQAGYAHTPALLGEVVRVQGDQAPHTLALAHAYVVNEGDAWNWTVAYLKRTLDAAILTGASADDYQQELAGYEVLAGTIGQRLAQMHSVLARAGELPGFAPRPASERDAALAGERAVAQLDRALQALRACESGLAPASHACAQWLFEHRDRLAAHIMTLAQAETGALRIRVHGDFHLGQILVAQTDAYLIDFEGEPARPMAERRQLSSPFKDVAGILRSFDYAVAELSRDDPLGGAPRDFNTGVAEPADPASAPRETREALLARFRQRAGAALLASYGNAIDPVLALPPERAQALTCLYLLEKAAYEICYESAYRPERLPVPIHGLAETARAALLAAAVDHDEGPAP

SEQ ID NO: 2602 - protein, 1238 aa, Bordetella pertussis
MPAPHRLYPRSLICLAQALLAWALLAWAPAQASQELTLVGKAAVPDVEVALDGDDWRWLARKRVLTLGVYAPDIPPFDVTYGERYEGLTADYMAIIAHNLGMQAKVLRYPTREQALSALESGQIDLIGTVNGTDGRQQSLRLSVPYAADHPVIVMPIGARHVPASNLAGQRLAVDINYLPKETLARAYPQATLHYFPSSEQALAAVAYGQADVFIGDALTTSHLVSQSYFNDVRVVAPAHIATGGESFGVRADNTRLLRVVNAVLEAIPPSEHRSLIYRWGLGSSISLDFAHPAYSAREQQWMADHPVVKVAVLNLFAPFTLFRTDEQFGGISAAVLQLLQLRTGLDFEIIGVDTVEELIAKLRSGEADMAGALFVNSARESFLSFSRPYVRNGMVIVTRQDPDAPVDADHLDGRTVALVRNSAAIPLLQRRYPQAKVVTADNPSEAMLMVANGQADAVVQTQISASYYVNRYFAGKLRIASALDLPPAEIALATTRGQTELMSILNKALYSISNDELASIISRWRGSDGDPRTWYAYRNEIYLLIGLGLLSALLFLSWIVYLRRQIRQRKRAERALNDQLEFMRVLIDGTPNPIYVRDKEGRMLLCNDAYLDTFGVTADAVLGKTIPEANVVGDPALAREMHEFLLTRVAAEREPRFEDRDVTLHGRTRHVYQWTIPYGDSLGELKGIIGGWIDITERAELLRKLHDAKESADAANRAKTTFLATMSHEIRTPMNAIIGMLELALLRPTDQEPDRQSIQVAYDSARSLLELIGDILDIAKIEAGKFDLAPVRTALRVLPEGAIRVFDGLARQKGIELVLKTDIVGVDDVLIDPLRMKQVLSNLVGNAIKFTTEGQVVLAVTARPDGDAAHVQFSVSDTGCGISEADQRQLFKPFSQVGGSAEAGPAPGTGLGLSISRRLVELMGGTLVMRSAPGVGTTVSVDLRLTMVEKSVQAAPPAAATAATPSKPQVSLRVLVVDDHKPNLMLLRQQLDYLGQRVIAADSGEAALALWREHAFDVVITDCNMPGISGYELARRIRAAEAAPGYGRTRCILFGFTASAQMDEAQRCRAAGMDDCLFKPIGVDALRQRLNEAVARAALPTPPSPQAAAPATDDATPTAFSAESILALTQNDEALIRQLLEEVIRTNRADVDQLQKLHQQADWPKVSDMAHRLAGGARVVDAKAMIDTVLALEKKAQGQAGPSPEIDGLVRTLAAQSAALETQLRAWLEQRPHQDQP

SEQ ID NO: 2603 - protein, 731 aa, Bordetella pertussis
MMRDSPSIQGTLDAATQHALLAGRHADPFSVLGPHQAGAHTVVRVLAPGARTVMAVLPGGQRTPLLPMQPGLFENTVPGLQPGAPAAYRLCIEWEGGIQHTADPYAFGPVLDAAQLDHCAAGGWRYLAGLLGAHAASVDGCAGTRFALWAPNARRVAVVGDFNGWDGRRHAMRLRYPAGVWELFLPDVGPGARYKFQVLGADGHTVLKADPLARQAEAPPATASIVPDERPFAWTDKAWMEQRAARQRCDAPISIYEVHAGSWFDDAGAPRWQNLAARLPEYARSLGFTHIELLPVMAHPFGGSWGYQPLGLFAPAAAHGAPADFAHFVDRCHEAGLGVILDWVPAHFPDDAHGLARLDGTPLYEHADPREGRHPDWNTLIYNYGRREVRTFLIASAIHWLRHYHVDGLRVDAVASMLYRDYSRPAGQWIPNRHGRRENLEAIDFLRELNAAVGVQCPGAITVAEESTAWPGVTAPVANGGLGFDYKWNMGWMHDTLRYMRRDPIHRRHHHHDLSFGMVYAYAERFVLPLSHDEVVHGKGSLLGKMPGERAAQLAQLRLYYAFMWAHPGKKLLFMGGEFGQQGEWNHDAMLQWSLLDDPAHRGLQRLVADLNHVYATLPELHCRDADPSGFAWIVGDDADNSVLAFARVDASHCLVAVCNFTPVPRPGYRFGVPHAGDWRVRVDTGATRYGGAGGGPPICLRSEPIPAHGHPQSLVLDLPGFTALYLRHSE

SEQ ID NO: 2604 - protein, 266 aa, Bordetella pertussis
MTVPRPESIIPPAGNAATGAAGIARAFKRALVSQCHPNMLFAVLLPFLIALLGAILLLWLFWTPLNEWLRFEASQWQAINQVDDWMVAAGLFSLKIYLVPVIAAAILLPISGILGLAIAAVFVMPLVLRHVGGREYAGLARQGRNATAVSVWNALWVSLAFGAGWLLTLPFWLIPPMVVILSVFWWAFAFTRMLRLDAIVEHASPAERAILLKRHNSGFWLIGLVCSLLNLLPPAWIILPVFSGLVYAHYGLDALQRLRQERAIDV

SEQ ID NO: 2605 - protein, 1010 aa, Bordetella pertussis
MYLDRFRQCPSSLQIPRSAWRLHALAAALALAGMARLAPAAAQAPQPPVAGAPHAQDAGQEGEFDHRDNTLIAVFDDGVGINLDDDPDELGETAPPTLKDIHISVEHKNPMSKPAIGVRVSGAGRALTLAGSTIDATEGGIPAVVRRGGTLELDGVTVAGGEGMEPMTVSDAGSRLSVRGGVLGGEAPGVGLVRAAQGGQASIIDATLQSILGPALIADGGSISVAGGSIDMDMGPGFPPPPPPLPGAPLAAHPPLDRVAAVHAGQDGKVTLREVALRAHGPQATGVYAYMPGSEITLQGGTVSVQGDDGAGVVAGAGLLDALPPGGTVRLDGTTVSTDGANTDAVLVRGDAARAEVVNTVLRTAKSLAAGVSAQHGGRVTLRQTRIETAGAGAEGISVLGFEPQSGSGPASVDMQGGSITTTGNRAAGIALTHGSARLEGVAVRAEGSGSSAAQLANGTLVVSAGSLASAQSGAISVTDTPLKLMPGALASSTVSVRLTDGATAQGGNGVFLQQHSTIPVAVALESGALARGDIVADGNKPLDAGISLSVASGAAWHGATQVLQSATLGKGGTWVVNADSRVQDMSMRGGRVEFQAPAPEASYKTLTLQTLDGNGVFVLNTNVAAGQNDQLRVTGRADGQHRVLVRNAGGEADSRGARLGLVHTQGQGNATFRLANVGKAVDLGTWRYSLAEDPKTHVWSLQRAGQALSGAANAAVNAADLSSIALAESNALDKRLGELRLRADAGGPWARTFSERQQISNRHARAYDQTVSGLEIGLDRGWSASGGRWYAGGLLGYTYADRTYPGDGGGKVKGLHVGGYAAYVGDGGYYLDTVLRLGRYDQQYNIAGTDGGRVTADYRTSGAAWSLEGGRRFELPNDWFAEPQAEVMLWRTSGKRYRASNGLRVKVDANTATLGRLGLRFGRRIALAGGNIVQPYARLGWTQEFKSTGDVRTNGIGHAGAGRHGRVELGAGVDAALGKGHNLYASYEYAAGDRINIPWSFHAGYRYSF

SEQ ID NO: 2606 - protein, 494 aa, Bordetella pertussis
MMQSHLDFALATPEILLLVLGLAILLIDAVSSHPERKTTFVLTLATLAALTVVSLLQWRDGVEGQTFNGLYVTDSLAHLLKVASYIAVAATLVYGRIYAQQRDMMQRGGELYVLTLFALLGQMVMISAGNLISIYLGLELMSLALYALIALRREDKVATEAAMKYFVLGALASGFLLYGMSMVYGATGHLDLAKIAEVIASGQAKQLPLVFGVVFLVSGLAFKLGAVPFHMWLPDVYQGSPTAVTLILGAAPKLAAFAITLRLLVDGLHGLAADWQPMLMILAVLSLAIGNLTAIVQTNFKRMLAYSTISHTGFVLLGLMAGVVDGKPDAAASAYGAALFYMLTYVLTTLGTFGIILLLARQGFECEQIDDLKGLNRRNPWHAAIVLLLMFSLAGIPPLVGFYAKLAVLQALVEAGHVALAVVAVMFSLIGAFYYLRVVKVVYFDDPVDQPAALAVTAGQRSILSLNGALILVLGILPGGLMALCVQVIQASLG

SEQ ID NO: 2607 - protein, 645 aa, Bordetella pertussis
MMQYGHASATGHGASATGRAAAAGRWLAWMLALALVLFARPAAALTEDDFLPPEQAFVFSAAMADPATLVLNYRIAPEYYMYRERFGLSASPAQAVTLGEAAYPQGKVKYDPTFDKDMEVFYGTVAVRVPLSQGNGQPFTLTVTSQGCADAGLCYPPMDNTVQLTPVTGGYALAAGTASAPQGGGTFDSLLEAGDTRLADFIGGGGWLKTAGVFLLLGMLLAFTPCVLPMVPILSSIVLGGAQAQRPSRWRGLGLAAAYVFGMSVVYTALGVAAGLSGAGLAAWLQTPWILSLFAILLAVLALAMFGAFTFQMPAGLQARLSERSNRIPGGRVTGALVMGALSALIVGPCVAAPLAGALLYISQTGDVILGGAALFAMAWGMGIPLLLVGASAGTLLPRTGPWMESVKRVFGMLLLGTAWWMLIPVVPTWVQMLGWSFLAVVGAVMLRAFDALPAGSGAPRMFAKGLGLLLALAGAAWLIGALSGGRDVLAPLSHLAARAPAGGAVAAAGPAAVDKTRFVRVRSNAELDALLARSTQPVMLDFYADWCVSCREMEHFTFSDPTVAARMSQMLLVQADVTKNNADDRALLKRFRLFGPPGIMFFEPGGKLIEDIRVVGFQDARRFAGVLEQVADRSGAPGPAQAGS

SEQ ID NO: 2608 - protein, 1706 aa, Bordetella pertussis
MQQSHQAGYANAADRESGIPAAVLDGIKAVAKEKNATLMFRLVNPHSTSLIAEGVATKGLGVHAKSSDWGLQAGYIPVNPNLSKLFGRAPEVIARADNDVNSSLAHGHTAVDLTLSKERLDYLRQAGLVTGMADGVVASNHAGYEQFEFRVKETSDGRYAVQYRRKGGDDFEAVKVIGNAAGIPLTADIDMFAIMPHLSNFRDSARSSVTSGDSVTDYLARTRRAASEATGGLDRERIDLLWKIARAGARSAVGTEARRQFRYDGDMNIGVITDFELEVRNALNRRAHAVGAQDVVQHGTEQNNPFPEADEKIFVVSATGESQMLTRGQLKEYIGQQRGEGYVFYENRAYGVAGKSLFDDGLGAAPGVPSGRSKFSPDVLETVPASPGLRRPSLGAVERQDSGYDSLDGVGSRSFSLGEVSDMAAVEAAELEMTRQVLHAGARQDDAEPGVSGASAHWGQRALQGAQAVAAAQRLVHAIALMTQFGRAGSTNTPQEAASLSAAVFGLGEASSAVAETVSGFFRGSSRWAGGFGVAGGAMALGGGIAAAVGAGMSLTDDAPAGQKAAAGAEIALQLTGGTVELASSIALALAAARGVTSGLQVAGASAGAAAGALAAALSPMEIYGLVQQSHYADQLDKLAQESSAYGYEGDALLAQLYRDKTAAEGAVAGVSAVLSTVGAAVSIAAAASVVGAPVAVVTSLLTGALNGILRGVQQPIIEKLANDYARKIDELGGPQAYFEKNLQARHEQLANSDGLRKMLADLQAGWNASSVIGVQTTEISKSALELAAITGNADNLKSVDVFVDRFVQGERVAGQPVVLDVAAGGIDIASRKGERPALTFITPLAAPGEEQRRRTKTGKSEFTTFVEIVGKQDRWRIRDGAADTTIDLAKVVSQLVDANGVLKHSIKLDVIGGDGDDVVLANASRIHYDGGAGTNTVSYAALGRQDSITVSADGERFNVRKQLNNANVYREGVATQTTAYGKRTENVQYRHVELARVGQLVEVDTLEHVQHIIGGAGNDSITGNAHDNFLAGGSGDDRLDGGAGNDTLVGGEGQNTVIGGAGDDVFLQDLGVWSNQLDGGAGVDTVKYNVHQPSEERLERMGDTGIHADLQKGTVEKWPALNLFSVDHVKNIENLHGSRLNDRIAGDDQDNELWGHDGNDTIRGRGGDDILRGGLGLDTLYGEDGNDIFLQDDETVSDDIDGGAGLDTVDYSAMIHPGRIVAPHEYGFGIEADLSREWVRKASALGVDYYDNVRNVENVIGTSMKDVLIGDAQANTLMGQGGDDTVRGGDGDDLLFGGDGNDMLYGDAGNDTLYGGLGDDTLEGGAGNDWFGQTQAREHDVLRGGDGVDTVDYSQTGAHAGIAAGRIGLGILADLGAGRVDKLGEAGSSAYDTVSGIENVVGTELADRITGDAQANVLRGAGGADVLAGGEGDDVLLGGDGDDQLSGDAGRDRLYGEAGDDWFFQDAANAGNLLDGGDGRDTVDFSGPGRGLDAGAKGVFLSLGKGFASLMDEPETSNVLRNIENAVGSARDDVLIGDAGANVLNGLAGNDVLSGGAGDDVLLGDEGSDLLSGDAGNDDLFGGQGDDTYLFGVGYGHDTIYESGGGHDTIRINAGADQLWFARQGNDLEIRILGTDDALTVHDWYRDADHRVEIIHAANQAVDQAGIEKLVEAMAQYPDPGAAAAAPPAARVPDTLMQSLAVNWR

SEQ ID NO: 2609 - protein, 296 aa, Bordetella pertussis
MRLPRQIRLPHLRDIGALLTDSAREWSRHRASSKGAALSLYMVFSLAPMLILVIAVAGAFFGEEAVRSELFSQVRDLTGERGAEVIQTVLASAHESGSGWLAALLSICVLVFSATTAFAELKASLDELWDVKEDKSGLQGLVRSRMLSFGLVLVLALFLLLSLTLNAALGAAKGYYGDLWSTSAFAMAADWLSNLFSFAVVTALFAVVYKLLPSKRIPWLDVIPGAIVTAALFLAGKWGIGLYLGRGAAVSAYGAAGSLIALLLWIYYSAQIFFFGAVFTRQFAERFGSLRRAAPA

SEQ ID NO: 2610 - protein, 866 aa, Bordetella pertussis
MKNESSTTTADLEQLVAEADRGGRHAGGVAGATLAAGALVWSLFQLWYASPLPFSLHWGVFNDTEARALHLGTAMFLGYLAYPATKRSARDRMPWYDWVLALAAGFCGAYLYLFYNELAIRPGQPTSMDVATAVAGLLLLLEVTRRALGLPMTVLGAVFVLYALAGPWLPDVLAHRGASIERLMSHMWLTTEGVYGVALGVSVSYIFIFVLLGSLLDKCGAGNYMMQVSFALLGHLRGGPAKVAVVSSAVNGLVSASSVANVVTGGIFTIPLMKKAGYGGVRAGAIETASSVNGQIMPPVMGAAAFLMIEYVGIPYTDIIRHAILPASISYIALFYSVHLEALKLGIEPMMAAGKPRTPLQKLAGWGMGISGTLIAMGLVYWIGVGVQAVAGAAAIWILLAMLVALNIWLLRVAARHPDLPTEIDVNHPVRPEPWPTVRAGLHFLIPIGILVWCLSVEELSAGLSAFWAAAATLLQMVTQRPLTAWFRGQAIAPAALLGWRDAIGGLQDDARNMIGIAIACGTAGLIVGAITLTGLGLRMTAFVELVSMGNVLLMLIFTAIVCLILGLGMPTTANYILMATLMAPVVVELGAQNGLIIPLIAVHMFVFYYGIMADITPPVGLATFAAAAISGADPIKTGVQGVTYALRTAVLPFMFVFNPLLLLIDVNSWTELILVAGSATLASLTFASATLGWFRVRCTMLEIVVLLAVTFMLFRPDWLLDQVSERYQARPAAEVVQTAAALPHNGRLVAVLRGINLEGDELTKTVAVALPALDEGETLQGEAAGRKRLTDAGLTIVALGDQVQIGGVRFGSTARRAGWEQGWDVLELRVPNPARPAEFWAYLPGLVLLALVWFAQGRRQRAAAR

SEQ ID NO: 2611 - protein, 584 aa, Bordetella pertussis [sequence omitted]

SEQ ID NO: 2612 - protein, 315 aa, Bordetella pertussis
MQAVLTAALPVFALILTGWLAARWRVLGPSATDALNRYVVYLSLPALLFRAMAQADLRQLADYWDFTAAVAGGIALTFGAAILACRRDGARLTDLSLEGLATSYGNAGYMGIPLCLALLGPASLAPAIITTLLTACVLFGVAIALIEFDQHRDRHWSATLLKVARALLRNPLLAAPLLGLACAAAGITLPAGLDNYAALLGASASPCALVTIGLFLAQSQPGGDRGTVGLMVGGKLLLHPAVTAVLAFAVFDMPPLWAWCAVLMAALPIGTGPFMLAQLYGRDARPSSRAILLSTVLSVPTITALVAWIGRQPLG

SEQ ID NO: 2613 - protein, 347 aa, Bordetella pertussis
MPTPLTLADFDYHLPPELIAQSPAAERGGSRLLHLDAASRLHDRRFPDLAGLLRPHDLLVFNDTRVIKARLTGQKATGGKVEVLVERITAPDRALAHVRASKSPGPGMRLRLAEAFEAEVLGREGELFDLRFPAPVLDLLDAHGATPLPPYITHAADATDERRYQTVYAREPGAVAAPTAGLHFDQPMLEQLAAQGVQRAFVTLHVGAGTFQPVRVQNLAEHIMHAEWYTVPEATVAAIARARAHGGRIVAVGTTSVRALESAAAQAQDGPLAAAQGDTRLFITPGYRYRAVDALLTNFHLPQSTLLMLVSALAGVEPIRRAYAHAVAERYRFFSYGDAMFIETPAP

SEQ ID NO: 2614 - protein, 307 aa, Bordetella pertussis
MQDLNDLYYFAQVVEQGGFSAASRVLDVPKSRLSRRISQLEDRLGVRLLQRTTRRLRLTTAGERYLHYCQEMTASARAAEDAMRQLQSAPAGPVVVSCPVSIAQQMLAPLLPEFLDAWPSVSVQLLVTNRRVDVIREGVDLALRVRTKLDTDAELVVKHLGIASGTLVASPAYLQRHGTPETPQELASHRTLSFNDPQNEVRWPLTNQRGESVEVAVQPVLASNDFIVLTQAAVRGRGIALLPSMASEAELRRGELVRVLPDWRSPEGIVHCIYPSRRGMMPAVRAFLDFLAKRVPPLVRQSDTARP

SEQ ID NO: 2615 - protein, 439 aa, Bordetella pertussis
MTQTPNTGSPHRVVIVGGGAGGLELAAKLGRAHGRERVTLVDSRPFHIWKPSLHEAAAGTLDIHQEGLSYLMLANMCNFTFAQGELQGIERERRQIQVGPVADPSGQQVLPPRELSYDTLVLAMGSTSNFFNTPGAAEHAVTLDTTENAEQFRLTMLKAMVQVDLRKVHDPSARLDLVIVGGGATGVELAVELIEASHVVSAYGLPNFRADRDLVITLVEGAPRILSALPEKISRATHARLTELGVRVETDCRVAEVGADHVVTADGRRFEATMCLWAAGIEGPPLFRQLGLPLNRLGQLEVNERQESPDPHILALGDCCAAPWKDGRTVPARAQAAHQQADYLARKLTARLRNAAEPTEAYAYHDHGSLVSLGQGSGVGSLMGKLAGRGLFVSGTLARLMYMSLHLMHHRAVLGISRTATLALARLLMRRTRPRVKLH

SEQ ID NO: 2616 - protein, 223 aa, Bordetella pertussis
MSDTDPFSLALFLALLALVPLIVVMTTSFLKIAVVLALVRNALGVQQVPPNMALYGLALILSAYVMAPVVHRIGTEVQALTAQAGESGTAAPMALDAVLGVAERGVGPLRAFMLRNSQPAQRDFFLRTARHLWGEEASRDLSEDNLLVLTPAFLVSELTAAFQLGFLLYLPFIIIDLIVSNILLAMGMMMVSPVTISMPLKLFLFVMVDGWTRLIQGLVLSYR

SEQ ID NO: 2617 - protein, 15 aa, Bordetella pertussis
TAGLHFDQPMLEQLA

SEQ ID NO: 2618 - protein, 15 aa, Bordetella pertussis
GDTRLFITPGYRYRA

SEQ ID NO: 2619 - protein, 15 aa, Bordetella pertussis
DALLTNFHLPQSTLL

SEQ ID NO: 2620 - protein, 15 aa, Bordetella pertussis
EPIRRAYAHAVAERY

SEQ ID NO: 2621 - protein, 15 aa, Bordetella pertussis
SPDALMVGFGAQRLL

SEQ ID NO: 2622 - protein, 15 aa, Bordetella pertussis
KVTVVPILRAGIGML

SEQ ID NO: 2623 - protein, 15 aa, Bordetella pertussis
DGVLSLIPGAKVSVV

SEQ ID NO: 2624 - protein, 15 aa, Bordetella pertussis
MSLSRIVKAAPLRRT

SEQ ID NO: 2625 - protein, 15 aa, Bordetella pertussis
IRRFLGTVTVKAGKL

SEQ ID NO: 2626 - protein, 15 aa, Bordetella pertussis
GAVVHLQRATIRRGD

SEQ ID NO: 2627 - protein, 15 aa, Bordetella pertussis
GKALLYPVLPEPVKL

What is claimed is:

1. A composition comprising:
one or more peptides or proteins, comprising, consisting of, or consisting essentially of an amino acid sequence selected from any one of those sequences set forth in Tables 1-20 (SEQ ID NOS: 1 to 2598), or a subsequence, portion, homologue, variant or derivative thereof;
a fusion protein comprising one or more amino acid sequences selected from any one of those sequences set forth in Tables 1-20; or
a pool of 2 or more or more peptides comprising, consisting of, or consisting essentially of amino acid sequences selected from any one of those sequences set forth in Tables 1-20; or
a polynucleotide that encodes one or more peptides or proteins, comprising, consisting of, or consisting essentially of an amino acid sequence selected from any one of those sequences set forth in Tables 1-20, or a subsequence, portion, homologue, variant or derivative thereof.

2. The composition of claim 1, wherein the one or more peptides or proteins comprises, or wherein the fusion protein comprises 2 or more or more amino acid sequences selected from any one of those sequences set forth in Tables 1-20, or a subsequence, portion, homologue, variant or derivative thereof.

3. The composition of claim 1 or claim 2, wherein the amino acid sequence is selected from a Bordetella T cell epitope selected from any one of those sequences set forth in Tables 1-20.

4. The composition of claim 1 or claim 2, wherein the composition comprises one or more B. pertussis peptides amino acid sequences selected from any one of those sequences set forth in Tables 1-20, or a subsequence, portion, homologue, variant or derivative thereof;
a fusion protein comprising one or more amino acid sequences selected from any one of those sequences set forth in Tables 1-20; or
a pool of 2 or more peptides selected from any one of those sequences set forth in Tables 1-20; or
a polynucleotide that encodes one or more peptides or proteins, comprising, consisting of, or consisting essentially of an amino acid sequence selected from any one of those sequences set forth in Tables 1-20, or a subsequence, portion, homologue, variant or derivative thereof.

5. The composition of any one of claims 1 to 5, wherein the peptide or protein comprises a Bordetella T cell epitope.

6. The composition of any one of claims 1 to 5, wherein the one or more peptides or proteins comprises a Bordetella CD8+ or CD4+ T cell epitope.

7. The composition of any one of claims 1 to 6, wherein the Bordetella is B. pertussis and the B. pertussis T cell epitope is not conserved in another Bordetella.

8. The composition of any one of claims 1 to 6, wherein the Bordetella is B. pertussis and the B. pertussis T cell epitope is conserved in another Bordetella.

9. The composition of any one of claims 1 to 8, wherein one or more peptides or proteins has a length from about 9-15, 15-20, 20-25, 25-30, 30-40, 40-50, 50-75 or 75-100 amino acids.

10. The composition of any one of claims 1 to 9, wherein the one or more peptides or proteins elicits, stimulates, induces, promotes, increases or enhances a T cell response to a Bordetella.

11. The composition of claim 10, wherein the one or more peptides or proteins that elicits, stimulates, induces, promotes, increases or enhances the T cell response to the Bordetella is a Bordetella protein or peptide, or a variant, homologue, derivative or subsequence thereof.

12. The composition of any one of claims 1 to 11, further comprising formulating the one or more peptides or proteins into an immunogenic formulation with an adjuvant.

13. The composition of claim 12, wherein the adjuvant is selected from the group consisting of adjuvant is selected from the group consisting of alum, aluminum hydroxide, aluminum phosphate, calcium phosphate hydroxide, cytosine-guanosine oligonucleotide (CpG-ODN) sequence, granulocyte macrophage colony stimulating factor (GM-CSF), monophosphoryl lipid A (MPL), poly(I:C), MF59, Quil A, N-acetyl muramyl-L-alanyl-D-isoglutamine (MDP), FIA, montanide, poly (DL-lactide-coglycolide), squalene, virosome, AS03, ASO4, IL-1, IL-2, IL-3, IL-4, IL-5, IL-6, IL-7, IL-8, IL-10, IL-12, IL-15, IL-17, IL-18, STING, CD40L, pathogen-associated molecular patterns (PAMPs), damage-associated molecular pattern molecules (DAMPs), Freund's complete adjuvant, Freund's incomplete adjuvant, transforming growth factor (TGF)-beta antibody or antagonists, A2aR antagonists, lipopolysaccharides (LPS), Fas ligand, Trail, lymphotactin, Mannan (M-FP), APG-2, Hsp70 and Hsp90, pattern recognition receptor ligands, TLR3 ligands, TLR4 ligands, TLR5 ligands, TLR7/8 ligands, and TLR9 ligands.

14. The composition of any one of claims 1 to 13, wherein the composition further comprises a modulator of immune response.

15. The composition of claim 14, wherein the modulator of immune response is a modulator of the innate immune response.

16. The composition of claim 14 or claim 15, wherein the modulator is Interleukin-6 (IL-6), Interferon-gamma (IFN-γ), Transforming growth factor beta (TGF-β), or Interleukin-10 (IL-10), or an agonist or antagonist thereof.

17. A composition comprising monomers or multimers of:
peptides or proteins comprising, consisting of, or consisting essentially of:
one or more amino acid sequences selected from any one ofthose sequences set forth in Tables 1-20,
concatemers, subsequences, portions, homologues, variants or derivatives thereof;
a fusion protein comprising one or more amino acid sequences selected from any one of those sequences set forth in Tables 1-20; or
a polynucleotide that encodes one or more peptides or proteins, comprising, consisting of, or consisting essentially of an amino acid sequence selected from any one of those sequences set forth in Tables 1-20, or a subsequence, portion, homologue, variant or derivative thereof.

18. A composition comprising one or more peptide-major histocompatibility complex (MHC) monomers or multimers, wherein the peptide-MHC monomer or multimer comprises a peptide comprising, consisting of, or consisting essentially of an amino acid sequence selected from any one of those sequences set forth in Tables 1-20, in a groove of the MHC monomer or multimer.

19. A composition comprising:
one or more peptides or proteins comprising, consisting of, or consisting essentially of an amino acid sequence selected from any one of those sequences set forth in Tables 1-20, or a subsequence, portion, homologue, variant or derivative thereof;
a fusion protein comprising one or more amino acid sequences selected from any one of those sequences set forth in Tables 1-20;
a pool of 2 or more peptides selected from any one of those sequences set forth in Tables 1-20; or
a polynucleotide that encodes one or more peptides or proteins, comprising, consisting of, or consisting essentially of an amino acid sequence selected from any one of those sequences set forth in Tables 1-20, or a subsequence, portion, homologue, variant or derivative thereof.

20. The composition of claim 19, wherein the one or more peptides or proteins comprises, or wherein the fusion protein comprises, 2 or more amino acid sequences selected from any one of those sequences set forth in Tables 1-20, or a subsequence, portion, homologue, variant or derivative thereof.

21. The composition of claim 19 or claim 20, wherein the protein or peptide comprises a B. pertussis T cell epitope.

22. The composition of any one of claims 19 to 21, wherein the one or more peptides or proteins comprises a B. pertussis CD8+ or CD4+ T cell epitope.

23. The composition of any one of claims 19 to 22, wherein the B. pertussis T cell epitope is not conserved in another Bordetella.

24. The composition of any one of claims 19 to 22, wherein the B. pertussis T cell epitope is conserved in another Bordetella.

25. The composition of any one of claims 19 to 24, wherein one or more peptides or proteins has a length from about 9-15, 15-20, 20-25, 25-30, 30-40, 40-50, 50-75 or 75-100 amino acids.

26. The composition of any one of claims 19 to 25, wherein the one or more peptides or proteins elicits, stimulates, induces, promotes, increases or enhances a T cell response to B. pertussis.

27. The composition of any one of claims 19 to 26, wherein the one or more peptides or proteins that elicits, stimulates, induces, promotes, increases or enhances the T cell response to B. pertussis is a B. pertussis protein or peptide, or a variant, homologue, derivative or subsequence thereof.

28. The composition of any one of claims 19 to 27, further comprising formulating the one or more peptides or proteins into an immunogenic formulation with an adjuvant.

29. The composition of claim 28, wherein the adjuvant is selected from the group consisting of adjuvant is selected from the group consisting of alum, aluminum hydroxide, aluminum phosphate, calcium phosphate hydroxide, cytosine-guanosine oligonucleotide (CpG-ODN) sequence, granulocyte macrophage colony stimulating factor (GM-CSF), monophosphoryl lipid A (MPL), poly(I:C), MF59, Quil A, N-acetyl muramyl-L-alanyl-D-isoglutamine (MDP), FIA, montanide, poly (DL-lactide-coglycolide), squalene, virosome, AS03, ASO4, IL-1, IL-2, IL-3, IL-4, IL-5, IL-6, IL-7, IL-8, IL-10, IL-12, IL-15, IL-17, IL-18, STING, CD40L, pathogen-associated molecular patterns (PAMPs), damage-associated molecular pattern molecules (DAMPs), Freund's complete adjuvant, Freund's incomplete adjuvant, transforming growth factor (TGF)-beta antibody or antagonists, A2aR antagonists, lipopolysaccharides (LPS), Fas ligand, Trail, lymphotactin, Mannan (M-FP), APG-2, Hsp70 and Hsp90, pattern recognition receptor ligands, TLR3 ligands, TLR4 ligands, TLR5 ligands, TLR7/8 ligands, and TLR9 ligands.

30. The composition of any one of claims 19 to 29, wherein the composition further comprises a modulator of immune response.

31. The composition of claim 30, wherein the modulator of immune response is a modulator of the innate immune response.

32. The composition of claim 30 or claim 31, wherein the modulator is Interleukin-6 (IL-6), Interferon-gamma (IFN-g), Transforming growth factor beta (TGF-B), or Interleukin-10 (IL-10), or an agonist or antagonist thereof.

33. A composition comprising monomers or multimers of:
one or more peptides or proteins comprising, consisting of, or consisting essentially of:
one or more B. pertussis amino acid sequences selected from any one of those sequences set forth in Tables 1-20, concatemers, subsequences, portions, homologues, variants or derivatives thereof;
a fusion protein comprising one or more amino acid sequences selected from any one of those sequences set forth in Tables 1-20; or
a polynucleotide that encodes one or more peptides or proteins, comprising, consisting of, or consisting essentially of an amino acid sequence selected from any one of those sequences set forth in Tables 1-20, or a subsequence, portion, homologue, variant or derivative thereof.

34. A composition comprising one or more peptide-major histocompatibility complex (MHC) monomers or multimers, wherein the peptide-MHC monomer or multimer comprises a peptide comprising, consisting of, or consisting essentially of an amino acid sequence selected from any one of those sequences set forth in Tables 1-20, in a groove of the (MHC) monomer or multimer.

35. A method for detecting the presence of: (i) a Bordetella or (ii) an immune response relevant to Bordetella infections, vaccines or therapies, including T cells responsive to one or more Bordetella peptides, comprising:
providing one or more proteins or peptides for detection of an amount or a relative amount of, and/or the activity of, and/or the state of antigen-specific T-cells;
contacting a biological sample suspected of having Bordetella-specific T-cells to one or more proteins or peptides for detection; and
detecting an amount or a relative amount of, and/or the activity of, and/or the state of antigen-specific T-cells in the biological sample, wherein the one or more proteins or peptides for detection comprise one or more amino acid sequences set forth in any one of Tables 1-20, or comprise a pool of 2 or more or more amino acid sequences set forth in any one of Tables 1-20.

36. The method of claim 35, wherein detecting the amount or a relative amount of, and/or activity of antigen-specific T-cells comprises one or more steps of identification or detection of the antigen-specific T-cells and measuring the amount of the antigen-specific T-cells.

37. The method of claim 35 or claim 36, wherein the one or more peptides or proteins comprises 2 or more amino acid sequences selected from those set forth in any one of Tables 1-20.

38. The method of any one of claims 35 to 37, wherein the detecting the amount or a relative amount of, and/or activity of antigen-specific T-cells comprises indirect detection and/or direct detection.

39. The method of any one of claims 35 to 38, wherein the method of detecting an immune response relevant to the Bordetella comprises the following steps:
providing an MHC monomer or an MHC multimer;
contacting a population T-cells to the MHC monomer or MHC multimer; and
measuring the number, activity or state of T-cells specific for the MHC monomer or MHC multimer.

40. The method of claim 39, wherein the MHC monomer or MHC multimer comprises a protein or peptide of the Bordetella.

41. The method of claim 35, wherein the protein or peptide comprises a CD8+ or CD4+ T cell epitope.

42. The method of claim 41, wherein the T cell epitope is not conserved in another Bordetella.

43. The method of claim 41, wherein the T cell epitope is conserved in another Bordetella.

44. The method of any one of claims 35 to 45, wherein the protein or peptide has a length from about 9-15, 15-20, 20-25, 25-30, 30-40, 40-50, 50-75 or 75-100 amino acids.

45. The method of any one of claims 35 to 44, wherein the proteins or peptides comprise 2 or more amino acid sequences selected from any one of those sequences set forth in Tables 1-20, or a subsequence, portion, homologue, variant or derivative thereof.

46. The method of any one of claims 35 to 45, further comprising detecting the presence or amount of the one or more peptides in a biological sample, or a response thereto, which is diagnostic of a Bordetella infection.

47. The method of any one of claims 35 to 46, wherein detecting an amount or a relative amount of, and/or the activity of, and/or the state of antigen-specific T-cells in the biological sample comprises measuring one or more of a cytokine or lymphokine secretion assay, T cell proliferation, immunoprecipitation, immunoassay, ELISA, radioimmunoassay, immunofluorescence assay, Western Blot, FACS analysis, a competitive immunoassay, a noncompetitive immunoassay, a homogeneous immunoassay a heterogeneous immunoassay, a bioassay, a reporter assay, a luciferase assay, a microarray, a surface plasmon resonance detector, a florescence resonance energy transfer, immunocytochemistry, or a cell mediated assay, or a cytokine proliferation assay.

48. The method of any one of claims 35 to 47, further comprising administering a treatment comprising the composition of any one of claims 1-34 to the subject from which the biological sample was drawn that increases the amount or relative amount of, and/or activity of the antigen-specific T-cells.

49. A method for detecting the presence of: (i) B. pertussis or (ii) an immune response relevant to B. pertussis infections, vaccines or therapies, including T cells responsive to one or more B. pertussis peptides, comprising:
providing one or more proteins or peptides for detection of an amount or a relative amount of, and/or the activity of, and/or the state of antigen-specific T-cells;
contacting a biological sample suspected of having B. pertussis-specific T-cells to one or more proteins or peptides for detection; and
detecting an amount or a relative amount of, and/or the activity of, and/or the state of antigen-specific T-cells in the biological sample, wherein the one or more proteins or peptides for detection comprise one or more amino acid sequences set forth in those sequences set forth in any one of Tables 1-20, or comprise a pool of 2 or more amino acid sequences set forth in those sequences set forth in any one of Tables 1-20.

50. The method of claim 49, wherein detecting the amount or a relative amount of, and/or activity of antigen-specific T-cells comprises one or more steps of identification or detection of the antigen-specific T-cells and measuring the amount of the antigen-specific T-cells.

51. The method of claim 49 or claim 50, wherein the one or more peptides or proteins comprises 2 or more amino acid sequences selected from any one of those sequences set forth in Tables 1-20.

52. The method of any one of claims 49 to 51, wherein the detecting the amount or a relative amount of, and/or activity of antigen-specific T-cells comprises indirect detection and/or direct detection.

53. The method of any one of claims 49 to 53, wherein the method of detecting an immune response relevant to B. pertussis comprises the following steps:
providing an MHC monomer or an MHC multimer;
contacting a population T-cells to the MHC monomer or MHC multimer; and
measuring the number, activity or state of T-cells specific for the MHC monomer or MHC multimer.

54. The method of claim 53, wherein the MHC monomer or MHC multimer comprises a protein or peptide of B. pertussis.

55. The method of claim 54, wherein the protein or peptide comprises a B. pertussis CD8+ or CD4+ T cell epitope.

56. The method of claim 55, wherein the B. pertussis T cell epitope is not conserved in another Bordetella.

57. The method of claim 55, wherein the B. pertussis T cell epitope is conserved in another Bordetella.

58. The method of any one of claims 49 to 57, wherein the protein or peptide has a length from about 9-15, 15-20, 20-25, 25-30, 30-40, 40-50, 50-75 or 75-100 amino acids.

59. The method of any one of claims 49 to 58, wherein the proteins or peptides comprise 2 or more amino acid sequences selected from any one of those sequences set forth in Tables 1-20, or a subsequence, portion, homologue, variant, or derivative thereof.

60. The method of any one of claims 49 to 59, further comprising detecting the presence or amount of the one or more peptides in a biological sample, or a response thereto, which is diagnostic of a B. pertussis infection.

61. The method of any one of claims 49 to 60, wherein detecting an amount or a relative amount of, and/or the activity of, and/or the state of antigen-specific T-cells in the biological sample comprises measuring one or more of a cytokine or lymphokine secretion assay, T cell proliferation, immunoprecipitation, immunoassay, ELISA, radioimmunoassay, immunofluorescence assay, Western Blot, FACS analysis, a competitive immunoassay, a noncompetitive immunoassay, a homogeneous immunoassay a heterogeneous immunoassay, a bioassay, a reporter assay, a luciferase assay, a microarray, a surface plasmon resonance detector, a florescence resonance energy transfer, immunocytochemistry, or a cell mediated assay, or a cytokine proliferation assay.

62. The method of any one of claims 49 to 61, further comprising administering a treatment comprising the composition of any one of claims 1-34 to the subject from which the biological sample was drawn that increases the amount or relative amount of, and/or activity of the antigen-specific T-cells.

63. A method detecting a Bordetella infection or exposure in a subject, the method comprising, consisting of, or consisting essentially of:
contacting a biological sample from a subject with a composition of any one of claims 1 to 36; and
determining if the composition elicits an immune response from the contacted cells, wherein the presence of an immune response indicates that the subject has been exposed to or infected with Bordetella.

64. The method of claim 63, wherein the sample comprises T cells.

65. The method of claim 63 or claim 64, wherein the response comprises inducing, increasing, promoting or stimulating anti-Bordetella activity of T cells.

66. The method of claim 63 or claim 65, wherein the T cells are CD8+ or CD4+ T cells.

67. The method of any one of claims 63 to 66, wherein the method comprises determining whether the subject has been infected by or exposed to the Bordetella more than once by determining if the subject elicits a secondary T cell immune response profile that is different from a primary T cell immune response profile.

68. The method of any one of claims 63 to 67, further comprising diagnosing a Bordetella infection or exposure in a subject, the method comprising contacting a biological sample from a subject with a composition of any one of claims 1 to 34, and determining if the composition elicits a T cell immune response, wherein the T cell immune response identifies that the subject has been infected with or exposed to a Bordetella.

69. The method of any one of claims 63 to 68, wherein the method is conducted three or more days following the date of suspected infection by or exposure to a Bordetella.

70. A method detecting B. pertussis infection or exposure in a subject, the method comprising, consisting of, or consisting essentially of:
contacting a biological sample from a subject with a composition of any one of claims 19 to 36; and
determining if the composition elicits an immune response from the contacted cells, wherein the presence of an immune response indicates that the subject has been exposed to or infected with B. pertussis.

71. The method of claim 70, wherein the sample comprises T cells.

72. The method of claim 70 or claim 71, wherein the response comprises inducing, increasing, promoting or stimulating anti-B. pertussis activity of T cells.

73. The method of claim 71 or claim 72, wherein the T cells are CD8+ or CD4+ T cells.

74. The method of any one of claims 70 to 73, wherein the method comprises determining whether the subject has been infected by or exposed to B. pertussis more than once by determining if the subject elicits a secondary T cell immune response profile that is different from a primary T cell immune response profile.

75. The method of any one of claims 70 to 74, further comprising diagnosing a B. pertussis infection or exposure in a subject, the method comprising contacting a biological sample from a subject with a composition of any one of claims 19 to 34; and determining if the composition elicits a T cell immune response, wherein the T cell immune response identifies that the subject has been infected with or exposed to B. pertussis.

76. The method of any one of claims 70 to 75, wherein the method is conducted three or more days following the date of suspected infection by or exposure to a Bordetella.

77. A kit for the detection of Bordetella or an immune response to Bordetella in a subject comprising, consisting of or consisting essentially of:
one or more T cells that specifically detect the presence of:
one or more amino acid sequences selected from any one ofthose sequences set forth in Tables 1-20, or a subsequence, portion, homologue, variant or derivative thereof, or
a fusion protein comprising one or more amino acid sequences selected from any one of those sequences set forth in Tables 1-20; or
a pool of 2 or more or more peptides selected from the amino acid sequences set forth in any one of Tables 1-20.

78. The kit of claim 77, wherein the one or more amino acid sequences are selected from a Bordetella T cell epitope set forth in any one of Tables 1-20.

79. The kit of claim 77 or claim 78, wherein the composition comprises:
one or more amino acid sequences selected from any one ofthose sequences set forth in Tables 1-20, or a subsequence, portion, homologue, variant or derivative thereof;
a fusion protein comprising one or more amino acid sequences selected from any one of those sequences set forth in Tables 1-20; or
a pool of 2 or more peptides selected from the amino acid sequences set forth in those sequences set forth in any one of Tables 1-20.

80. The kit of any one of claims 77 to 79, wherein the amino acid sequence comprises a Bordetella CD8+ or CD4+ T cell epitope.

81. The kit of claim 78 or claim 80, wherein the T cell epitope is not conserved in another Bordetella.

82. The kit of claim 78 or claim 80, wherein the T cell epitope is conserved in another Bordetella.

83. The kit of any one of claims 77 to 82, wherein the fusion protein has a length from about 9-15, 15-20, 20-25, 25-30, 30-40, 40-50, 50-75 or 75-100 amino acids.

84. The kit of any one of claims 77 to 83, wherein the kit includes instruction for a diagnostic method, a process, a composition, a product, a service or component part thereof for the detection of: (i) Bordetella or (ii) an immune response relevant to Bordetella infections, vaccines or therapies, including T cells responsive to Bordetella.

85. The kit of any one of claims 77 to 84, wherein the kit includes reagents for detecting an amount or a relative amount of, and/or the activity of, and/or the state of antigen-specific T-cells in the biological sample comprises measuring one or more of a cytokine or lymphokine secretion assay, T cell proliferation, immunoprecipitation, immunoassay, ELISA, radioimmunoassay, immunofluorescence assay, Western Blot, FACS analysis, a competitive immunoassay, a noncompetitive immunoassay, a homogeneous immunoassay a heterogeneous immunoassay, a bioassay, a reporter assay, a luciferase assay, a microarray, a surface plasmon resonance detector, a florescence resonance energy transfer, immunocytochemistry, or a cell mediated assay, or a cytokine proliferation assay.

86. The kit of any one of claims 77 to 85, wherein the kit includes reagents for determining a Human Leukocyte Antigen (HLA) profile of a subject, and selecting peptides that are presented by the HLA profile of the subject for detecting an immune response to Bordetella.

87. A kit for the detection of B. pertussis or an immune response to B. pertussis in a subject comprising, consisting of or consisting essentially of:
one or more T cells that specifically detect the presence of:
one or more amino acid sequences selected from any one ofthose sequences set forth in Tables 1-20, or a subsequence, portion, homologue, variant or derivative thereof;
a fusion protein comprising one or more amino acid sequences selected from any one of those sequences set forth in Tables 1-20; or
a pool of 2 or more peptides selected from the amino acid sequences set forth in those sequences set forth in any one of Tables 1-20.

88. The kit of claim 87, wherein the one or more amino acid sequences is selected from a B. pertussis CD4 T cell epitope selected from any one of Tables 1-20; or both.

89. The kit of claims 87 to 88, wherein the amino acid sequence comprises a B. pertussis CD8+ or CD4+ T cell epitope.

90. The kit of claim 89, wherein the B. pertussis T cell epitope is not conserved in another Bordetella.

91. The kit of claim 89, wherein the B. pertussis T cell epitope is conserved in another Bordetella.

92. The kit of any one of claims 87 to 91, wherein the fusion protein has a length from about 9-15, 15-20, 20-25, 25-30, 30-40, 40-50, 50-75 or 75-100 amino acids.

93. The kit of any one of claims 87 to 92, wherein the kit includes instruction for a diagnostic method, a process, a composition, a product, a service or component part thereof for the detection of: (i) B. pertussis or (ii) an immune response relevant to B. pertussis infections, vaccines or therapies, including T cells responsive to B. pertussis.

94. The kit of any one of claims 87 to 93, wherein the kit includes reagents for detecting an amount or a relative amount of, and/or the activity of, and/or the state of antigen-specific T-cells in the biological sample comprises measuring one or more of a cytokine or lymphokine secretion assay, T cell proliferation, immunoprecipitation, immunoassay, ELISA, radioimmunoassay, immunofluorescence assay, Western Blot, FACS analysis, a competitive immunoassay, a noncompetitive immunoassay, a homogeneous immunoassay a heterogeneous immunoassay, a bioassay, a reporter assay, a luciferase assay, a microarray, a surface plasmon resonance detector, a florescence resonance energy transfer, immunocytochemistry, or a cell mediated assay, or a cytokine proliferation assay.

95. The kit of any one of claims 87 to 94, wherein the kit includes reagents for determining a Human Leukocyte Antigen (HLA) profile of a subject, and selecting peptides that are presented by the HLA profile of the subject for detecting an immune response to B. pertussis.

96. A method of stimulating, inducing, promoting, increasing, or enhancing an immune response against a Bordetella in a subject, comprising:
administering a composition of claims 1 to 34, in an amount sufficient to stimulate, induce, promote, increase, or enhance an immune response against the Bordetella in the subject.

97. The method of claim 96, wherein the immune response provides the subject with protection against a Bordetella infection or pathology, or one or more physiological conditions, disorders, illnesses, diseases or symptoms caused by or associated with Bordetella infection or pathology.

98. The method of claim 96 or claim 97, wherein the immune response is specific to:
one or more B. pertussis peptides selected from the amino acid sequences set forth in any one of Tables 1-20, or a subsequence, portion, homologue, variant or derivative thereof.

99. A method of stimulating, inducing, promoting, increasing, or enhancing an immune response against B. pertussis in a subject, comprising:
administering a composition of claims to 19 to 34, in an amount sufficient to stimulate, induce, promote, increase, or enhance an immune response against B. pertussis in the subject.

100. The method of claim 99, wherein the immune response provides the subject with protection against a B. pertussis infection or pathology, or one or more physiological conditions, disorders, illnesses, diseases or symptoms caused by or associated with B. pertussis infection or pathology.

101. The method of claim 99 or claim 100, wherein the immune response is specific to:
one or more B. pertussis peptides selected from the amino acid sequences set forth in those sequences set forth in any one of Tables 1-20, or a subsequence, portion, homologue, variant or derivative thereof.

102. A method of stimulating, inducing, promoting, increasing, or enhancing an immune response against B. pertussis in a subject, comprising:
administering to a subject an amount of a protein or peptide or a polynucleotide that expresses the protein or peptide comprising, consisting of or consisting essentially of an amino acid sequence of the B. pertussis protein or peptide, or a variant, homologue, derivative or subsequence thereof, wherein the protein or peptide comprises at least two peptides selected from the amino acid sequences set forth in any one of Tables 1-20 or a subsequence, portion, homologue, variant or derivative thereof, in an amount sufficient to prevent, stimulate, induce, promote, increase, immunize against, or enhance an immune response against B. pertussis in the subject.

103. The method of claim 102, wherein the immune response provides the subject with protection against B. pertussis infection or pathology, or one or more physiological conditions, disorders, illnesses, diseases or symptoms caused by or associated with B. pertussis infection or pathology.

104. A method of treating, preventing, or immunizing a subject against B. pertussis infection, comprising administering to a subject an amount of a protein, peptide or a polynucleotide that expresses the protein or peptide comprising, consisting of, or consisting essentially of an amino acid sequence of a Bordetella protein or peptide, or a variant, homologue, derivative or subsequence thereof, wherein the protein or peptide comprises at least two amino acid sequences selected from any one of Tables 1-20 or a subsequence, portion, homologue, variant or derivative thereof, in an amount sufficient to treat, prevent, or immunize the subject for B. pertussis infection, wherein the protein or peptide comprises or consists of a Bordetella T cell epitope that elicits, stimulates, induces, promotes, increases, or enhances an anti-B. pertussis T cell immune response.

105. The method of claim 104, wherein the one or more amino acid sequences are selected from any one of those sequences set forth in Tables 1-20, or a subsequence, portion, homologue, variant or derivative thereof;
a fusion protein comprising one or more amino acid sequences selected from any one of those sequences set forth in Tables 1-20; or
a pool of 2 or more peptides selected from the amino acid sequences set forth in those sequences set forth in Tables 1-20.

106. The method of claim 104, wherein the anti-B. pertussis T cell response is a CD8+, a CD4+ T cell response, or both.

107. The method of any of claims 104 to 106, wherein the T cell epitope is conserved across two or more clinical isolates of B. pertussis or two or more circulating forms of B. pertussis.

108. The method of claim 107, wherein the B. pertussis infection is an acute infection.

109. The method of any one of claims 104 to 108, wherein the subject is a mammal or a human.

110. The method of any one of claims 104 to 109, wherein the method reduces B. pertussis bacterial titer, increases or stimulates B. pertussis bacterial clearance, reduces or inhibits B. pertussis bacterial proliferation, reduces or inhibits increases in B. pertussis bacterial titer or B. pertussis bacterial proliferation, reduces the amount of a B. pertussis bacterial protein or the amount of a B. pertussis bacterial nucleic acid, or reduces or inhibits synthesis of a B. pertussis bacterial protein or a B. pertussis bacterial nucleic acid.

111. The method of any one of claims 104 to 110, wherein the method reduces one or more adverse physiological conditions, disorders, illness, diseases, symptoms or complications caused by or associated with B. pertussis infection or pathology.

112. The method of any one of claims 104 to 111, wherein the method improves one or more adverse physiological conditions, disorders, illness, diseases, symptoms or complications caused by or associated with B. pertussis infection or pathology.

113. The method of claim 111 or 112, wherein the symptom is fever or chills, cough, shortness of breath or difficulty breathing, fatigue, muscle or body aches, headache, new loss of taste or smell, sore throat, congestion or runny nose, nausea or vomiting, or diarrhea.

114. The method of any one of claims 104 to 113, wherein the method reduces or inhibits susceptibility to B. pertussis infection or pathology.

115. The method of any one of claims 104 to 113, wherein the protein or peptide, or a subsequence, portion, homologue, variant or derivative thereof, is administered prior to, substantially contemporaneously with or following exposure to or infection of the subject with B. pertussis.

116. The method of any one of claims 104 to 115, wherein a plurality of B. pertussis T cell epitopes are administered prior to, substantially contemporaneously with or following exposure to or infection of the subject with B. pertussis.

117. The method of any one of claims 104 to 116, wherein the protein or peptide, or a subsequence, portion, homologue, variant or derivative thereof is administered within 2-72 hours, 2-48 hours, 4-24 hours, 4-18 hours, or 6-12 hours after a symptom of B. pertussis infection or exposure develops.

118. The method of any one of claims 104 to 117, wherein the protein or peptide, or a subsequence, portion, homologue, variant or derivative thereof is administered prior to exposure to or infection of the subject with B. pertussis.

119. The method of any one of claims 104 to 118, wherein the method further comprises administering a modulator of immune response prior to, substantially contemporaneously with or following the administration to the subject of an amount of a protein or peptide.

120. The method of claim 119, wherein the modulator of immune response is a modulator of the innate immune response.

121. The method of claim 119 or claim 120, wherein the modulator is IL-6, IFN-γ, TGF-β, or IL-10, or an agonist or antagonist thereof.

122. A method of treating, preventing, or immunizing a subject against B. pertussis infection, comprising administering to a subject the composition of any one of claims 1-36 in an amount sufficient to treat, prevent, or immunize the subject for B. pertussis infection.

123. The method of claim 122, wherein the B. pertussis infection is an acute infection.

124. The method of claim 127, wherein the method reduces B. pertussis bacterial titer, increases or stimulates B. pertussis bacterial clearance, reduces or inhibits B. pertussis bacterial proliferation, reduces or inhibits increases in B. pertussis bacterial titer or B. pertussis bacterial proliferation, reduces the amount of a B. pertussis bacterial protein or the amount of a B. pertussis bacterial nucleic acid, or reduces or inhibits synthesis of a B. pertussis bacterial protein or a B. pertussis bacterial nucleic acid.

125. The method of any one of claims 122 to 124, wherein the method reduces one or more adverse physiological conditions, disorders, illness, diseases, symptoms or complications caused by or associated with B. pertussis infection or pathology.

126. The method of any one of claims 122 to 125, wherein the method improves one or more adverse physiological conditions, disorders, illness, diseases, symptoms or complications caused by or associated with B. pertussis infection or pathology.

127. The method of claim 125 or claim 126, wherein the symptom is fever or chills, cough, shortness of breath or difficulty breathing, fatigue, muscle or body aches, headache, new loss of taste or smell, sore throat, congestion or runny nose, nausea, vomiting, or diarrhea.

128. The method of any one of claims 122 to 127, wherein the method reduces or inhibits susceptibility to B. pertussis infection or pathology.

129. The method of any one of claims 122 to 133, wherein the composition is administered prior to, substantially contemporaneously with or following exposure to or infection of the subject with B. pertussis.

130. The method of any one of claims 122 to 128, wherein the composition is administered prior to, substantially contemporaneously with or following exposure to or infection of the subject with B. pertussis.

131. The method of any one of claims 122 to 130, wherein the composition is administered within 2-72 hours, 2-48 hours, 4-24 hours, 4-18 hours, or 6-12 hours after a symptom of B. pertussis infection or exposure develops.

132. The method of any one of claims 122 to 130, wherein the composition is administered prior to exposure to or infection of the subject with B. pertussis.

133. A peptide or peptides that are immunoprevalent or immunodominant in a bacteria obtained by a method consisting of, or consisting essentially of:
obtaining an amino acid sequence of the bacteria;
determining one or more sets of overlapping peptides spanning one or more bacteria antigen using unbiased selection;
synthesizing one or more pools of bacteria peptides comprising the one or more sets of overlapping peptides;
combining the one or more pools of bacteria peptides with Class I major histocompatibility proteins (MHC), Class II MHC, or both Class I and Class II MHC to form peptide-MHC complexes;
contacting the peptide-MHC complexes with T cells from subjects exposed to the bacteria;
determining which pools triggered cytokine release by the T cells; and
deconvoluting from the pool of peptides that elicited cytokine release by the T cells, which peptide or peptides are immunoprevalent or immunodominant in the pool.

134. The peptide or peptides of claim 133, wherein the bacteria is a Bordetella.

135. The peptide or peptides of claim 134, wherein the Bordetella is B. pertussis.

136. The peptide or peptides of any one of claims 133 to 135, wherein the immunodominant peptides are selected from 1, 2 or more peptides selected from the amino acid sequences set forth in any one of Tables 1-20.

137. The peptide or peptides of any one of claims 133 to 136, wherein the immunodominant peptides are selected from 1, 2 or more peptides selected from the amino acid sequences set forth in those sequences set forth in any one of Tables 1-20.

138. A method of selecting an immunoprevalent or immunodominant peptide or protein of a bacteria comprising, consisting of, or consisting essentially of:
obtaining an amino acid sequence of the bacteria;
determining one or more sets of overlapping peptides spanning one or more bacteria antigen using unbiased selection;
synthesizing one or more pools of bacteria peptides comprising the one or more sets of overlapping peptides;
combining the one or more pools of bacteria peptides with Class I major histocompatibility proteins (MHC), Class II MHC, or both Class I and Class II MHC to form peptide-MHC complexes;
contacting the peptide-MHC complexes with T cells from subjects exposed to the bacteria;
determining which pools triggered cytokine release by the T cells; and
deconvoluting from the pool of peptides that elicited cytokine release by the T cells, which peptide or peptides are immunoprevalent or immunodominant in the pool.

139. The method of claim 138, wherein the bacteria is a Bordetella.

140. The method of claim 139, wherein the Bordetella is B. pertussis.

141. The method of any one of claim 138 to 140, wherein the immunodominant peptides are selected from 1, 2 or more peptides selected from the amino acid sequences set forth in any one of Tables 1-20.

142. The method of any one of claims 138 to 141, wherein the immunodominant peptides are selected from 1, 2 or more peptides selected from the amino acid sequences set forth in those sequences set forth in any one of Tables 1-20.

143. A polynucleotide that expresses one or more peptides or proteins, comprising, consisting of, or consisting essentially of an amino acid sequence selected from any one of those sequences set forth in Tables 1-20, or a subsequence, portion, homologue, variant or derivative thereof;
a fusion protein comprising one or more amino acid sequences selected from any one of those sequences set forth in Tables 1-20; or
a pool of 2 or more or more peptides comprising, consisting of, or consisting essentially of amino acid sequences selected from any one of those sequences set forth in Tables 1-20.

144. A vector that comprises the polynucleotide of claim 143.

145. The vector of claim 144, wherein the vector is a bacterial vector.

146. A host cell that comprises the vector of claim 144 or claim 145.

147. A polynucleotide that expresses:
one or more peptides or proteins comprising, consisting of, or consisting essentially of an amino acid sequence selected from any one of those sequences set forth in Tables 1-20, or a subsequence, portion, homologue, variant or derivative thereof;
a fusion protein comprising one or more amino acid sequences selected from any one of those sequences set forth in Tables 1-20; or
a pool of 2 or more peptides selected from any one of those sequences set forth in Tables 1-20.

148. A vector that comprises the polynucleotide of claim 147.

149. The vector of claim 148, wherein the vector is a bacterial vector.

150. A host cell that comprises the vector of claim 148 or claim 149.
